United States Patent Application Publication US 2026/0357256 A1 - sequence listing, part 27

SEQ ID NO: 9 - DNA, 58617616 bp, Homo sapiens (residues 56,446,599-58,617,616 of 58,617,616)
  source 1..58617616: mol_type = genomic DNA
aaacacatcttgctccaagggttctagagaaagctttgtggacctgcagttgcttaataactggtagtagctaccattataattattattagtagaagttccagaaaacaaccagacaaaataaggaattaacacaggaagataatggaaatgtttatagtgaagctagcagcatcagcaaaacaagaaacccaagattcctcctatagtccttcccaccccacatcccattaagtcacatcagttaagctgcttctccctctcacattttcctaaaactcttagcttcccttccttttcctttgtaccttcctttgttccttcctgtgtggaatactaacatatcccctcagcccatctccccatcttcaatgtggaaatccttaaaccacaccagacaccaaaattaatcccaggtaaattagttcaatataaagtacaaaatcattacaaactaaaataatatgaaatctaccccaaattctttctaactatggaaataaaaagaaaaattataatgtgaatgccaatacttccaatcacacaaaaatgaaaaaaactttcatataaccaagtagaaaaataagaggtaaataaaataaaaagacttaggaaagaatggggaaatatttgaagtcaaatgtaatgtcatatggttaatgtattttctatatgaaagcttactatacaagcagaaaataaaaaagtcactgctagataaaaggggaaagatcacgaaaaaacaattcacgagaataagtaaaaacagaaaacaaatgctagtaaatctacaagaaagatttatggcctatccagtatgggtaaaccaatatggatatccagtctatccacaagggctcaagaaacaaactggtacttgggaggctgaggcaggaggactgcttgagcccaggagtttaaggttgcagtgagccatgactgcaccactacactccagcctgggtaacagaagaccctgtccctgtctccttaaaaaaaaacaaacaaacatggtgactcacacctttaatcctagcactttgggaggccgaggtgggtggatcacaaggtcaggagttcaagactatcctgaccaacatggtgaaaccccatctctactaaaaacacaaaaattagctgggtatggtgatgtgtgcctgtaatcccggctactcaggaggctggggcaggagaattgcatgaacccaggaggcggaggttgcagtgagctgagatggtgccactgcactccagcctaggtgacagagggagactctatctcaaaaaacaaacaaaacaactaaaaaggagaaagtggaagagccagatggccaaatagagccctccagcgattgccccctctgcagtaacgccaaattgaacaactatccacataagaaaacaccttcataggaaccaaaaattaggtgagcaatcaaagtatcaagttttaacatcgtattcaaagaaagaggcactgaggagggtagaaaagacagtcatcatatgcctgcaccacccctcccccaatgcctggcagtgcagcatggcaacaagagagaatctatgtgtttggaggaggaagaatggagtgatggtgggactctgcattggaactcagtgctgccctgtcacagcagaaagcaacgtggggcagaatttggccagcacccccagaggaagcatttaaatcagctctagcctaagaattgtccaccacagtggtggaaacttgagttccagcaagtacccccaccacagactaaaacactctggtgtcctaagtaaatctgaaaggcagtctaggccacaaggactgcaattcctgggcaaatcctagtgctgtgcttggctcagaaccagtggacttggggtacctgctacccagtgacataccagtgacacaccagctggagtggccaagagagtgtttgtatcaactctctcccaactccaggcagcacagctggcagctccaaggggagagggaagagtaaagaggacgttgtcttgcaacttggatatcatctcaaccacagtaaaaaaaaaaaagtgccaagcagtgtcctgaaggcctcattctaggccataggtcctggacaagatttctagacctaccctgggccagaaggcaactcgctgccctaaagggaaaaacaggcctggaagaatttaccacctgatgaattaagacctcttgggcttcgaataaacatcagtggtagccaggcagtggtagccacaggccttgggcaagaatgagtactacgctggcttcgggtcagacccagcacagtcccagtgttggtggccatgggagtgtttgtatcatcccttccccaactctaggcagctcagcacagagacagagagactccattcattcagggaaagtaagggaaaagaatgacttcctggtaatctagggaattctcctggatcttaccaaagaccaccaaggcagtacttctgtgagtctacaagagtcacagagttactggccatggggtgacccctaatgcaaacatggctgcagtgaacaaagacacatcctagcccctttgaatacatggagagtcttctctggaaggactagtacaaacaagcccagactacaaagataagaataaatacctaattcatcaatgaccaggtactgacaaacatccataagcatcaagaccatccgggaaaacatgacctcaccaaatgaactaaataaggcaacagtgaccagttctggagtgacagagctaatgtgaccgttcagtcagagaattcaaaatagctatcttggcctggcatggtggagcatgcctgtaatcccagcactttgggaggccaaggcgggcgggtggatcacctgagttcaggagttcgagaccagcctgaccaacatggtgaaaccccgtctctactaaaaataaaaaaaaattagctgggcatagtgggacacacctgtaatcccagccgctcgggaggctgaggcacgagaattgcttgaacccaggaggcggaggttgcagtgagccgagatcatgccatcattgtagtccagcctggggaacagagagaaactctgtctcaaaaaaaaaaaaaaaaaagctattttgaggaagctcaacaaaatccaagataacacagagcaggaattcagaatcctatcagataaattttaaaaagacattgaaataattaaagagaatcaagcagaaattctggagctgaaaaattcagttgacaaattaaagaatgcatcagagtctctcaacagcagaattgatcaagcagaagaaatagtgagcttgaagatgggctctttgaaaatatagtcagaggagtcaaagggaagaagaataataaagcatgcctacaggatctagtatatagacccaaaagggcatatctaggagttagtggcttaaagagaaggcagagagactggggtagaaagtgtattccgagatagtaacagagaactttccaaacctggagaaagatgtcaaaattcaagtacaaggaggttatagaacaccaagcagctttaatccaaagaaggctacctcagataatttaataaactcccaaatgtcagggataaagacatgatcctaaaagcagcaagagaaaagaaacaacataaaacggaactctaatacatctggcagcagattgctcagtggaaaccttataggccaggagagagaattatgatatatttaaagagctgaagaaaacaaaaacatttatcctggaatattatatccagtgaaaatgcccttcaaacaggaaggagaaataaagactttcctagacaaacaaaagctgagagattttgtcaacaccagacctctcctacaagaaagcctatagggagttcatcagtctgaaagaaaaggatgctaatgacgaataaaaagtcatctgaacatacaacactcactagcaatagtaactgcacagataaatacaaaatattataatactgtaattgtgatgtgtaaactactcatatcttaagtaggaagactaaaagacggactgacaaaaaaacggcaactacaacaactcaagacacacagtattaaaatataaacaacaaaaagtttaaaagcagaggagataaatttaaagtatagggtttttattagttttctctttgcttgtttgttggtttgtttttgcaaagttaaattgtcatcagtttaaattaatgggttataagatattatttacgagcctcatgctgacctcaaataaaaaatatgtaagagatacacaaaaaatataattcaagaaatcactttcacaaggaagacaagaaggaaaaagaaaaggccacaaaacaaccaaaacaaataacaaaatgtcagtagtaggtctctacttataaatattaaatgtacatggactaaatctccagtcaaaagccacagagtggctggatgaatttttaaaaagactcaatgatctgttccctataagaaacatgatttgcctataaagacacacatagactaaaaataaagggagggaaaaaaaatcccatgcaaatgaaaaccaaaaaagagcaggagcagctatatttagataaaatagagcttaagacaaaaagtatggaaagatacaaagaaagtcatataatgctaaaaggatcaattcagcaaagggatataacaattgtaaatatatacacacccaacaatggagcaccgagatacataaagcaaatattttcagagctaaagagagagacagaccacaatacaataattgttggagacttaaccacttcattttcagcattgcacaaatcatccagacagaaaatcaacaaagaaacatcggacctaatggacctaatagatatttacagacaatttcatccaataactacaggttacacattctgctcagcacatggatcattctcaggtatagaccatgaaatattaggacacaagacaagtcttaaaaatccaaaaaaaagctgggtgcactggctcacacctctaatcccagcactttgggaggctgaggcaggtggattgcttgagctcaatagtccaagaccagcctgggcaccatggtgaaatcccatctttaaaaaaaatgcaaaaattagccaggcgtggtggcacatgcctgtagtcccagctactcagtaggccaaggtgggaatattgcttgagcctagaaggttgaggctgcagtgagttgtgatcgcaccactgtattccagcctgggtgacagagcaagaccctgtctcaaaaaaaaaaaaaaaaaaaaaaaaaaaaaaactttcaaattgaaatcatatcaagtatcttctctgaccacaatggaacaaaactagaaatcaataatgagaagaactttggaaagtataccaacacattgaaattaaacaatataatactgaatgaccagtgggtcaatgaagaaatctcttttttttttttttttgagacagagtttcgctcttgttgtccaggctggagtgcaatggcgcgatcttggctcactgcaacctctgcctcctgggttcaagcgattctcctgcctcagcctcccgagtagctgggattacagccatccaccaccatgcctggttaatttcttgtatttttagtagagacagggtttcaccatggtggccaggctggtttcgaactcctgacctcaggtgatccgcccacctcggcctcccaaagtgctgggattataggcgtgagccaccacccccggcctgaagaaatttcttaattaaaatttaaaaattcctcaaaacaaatgataatgaaaacacaacatatgaaaacatgctgcaacctatgggatacagcaaaagcagtatgaagagagtttgtaacaataaacgcctacaccaaaaaagtaaaaaacttcaaataacctaatgatgcatcttaaagaactagaaaaccaagagcaaaccaaaccccaaattcgcagaaaaaaagaaatagtaaggatcagagcagaaagaaatgaaatttaaattagaaaaccacaaaagagcctgggcgcggtggctcacacctgtaatcccagcattttgggaagccaaggtgggcggatcacctgaggtcaggagttcaagaccagcctgaccaacatggtgaaaccccatctctactaaaaatacaaaaattagccaggcgtggtggcggacgcttgtaatcccagctactcaggaggctgaggcaggagaattgcatgaacatggcagtggaggttgcagtgagccgagattgtgccactgcactccagcctgggtgacagagcaagactctgtctcaaaaaaaaaaaaatgccacaaaagatcaacaaaatgaaattttttcaaaaacataaacagaattgacaaacttttaatcagattaagaaaaaaagagataagaccagagatgcaaaaggaatgattgcaactgatactacagatactcaaaggatcattagagactactatgagcaacctaggccaatacattagaaaacctagaagaaatagataaattcctagacacatacaacctaccaagactgaatcatgaagacatccaaaacctgaacagagcaataacaaacaatgagattgaagctgtaataaagtttcccagcaaagaaacacccaggacctgacagcttcactgctgagttttaccaaatacttaaaaaaacctaataccaatcctactcaaactattccaaaaaatagaggaggacagaatacttccaaactcattctacaaggccagtattaccctgatatcaaaacccaaggacacatcaaaaaaagagcttaatattaattcaagaatcctcaacaaaatactagcaaactgaattcaacacattaaacagatctttcatcatgaacaagaacgattaatcccaggaatgcctggatgctttgatatatgcaaatcaatgatatatataaacagaatgaaggacaaaaaacatatgatcacttcagttgacgctgaaaagcatttgataaaatttaacatcccttcatgatgcgatccctcaaaaaactggttatagaggaacattcctcaacacaataaaagccgtatatgacagacccatggctagtataatactgaatggaaaaaaaacctgaaagcctttcctctaacatcaggaaaataaaaagaatgcccactttcacaactattattctacattcaacatagcactggaagtcctagctagagcaatcagagaagagaaagaaataaaaggcatccaagttggaaaggaagacgtcaaattcttcttctttgcagatgatatgatcttttagttggaaaatcataaaaaatccacctagaaactattacaactgataaatttagtaaagttgcaggatacaaaatcaacatataaaaatccagcagcatttctatatgccaacagtgagcaatctgaaaaagaaatcaagtaatcccatttacaatagctacaaataaaataaaatacctaggaataaacttaacaaacacagtgaaattacaatgaaaactacaaaacctgatgcaagaaactgatgaggacacaaaaatatggaaagatagtccatgctcatggatttgaagaataattattagtaaaatgcccatactacccaaattaatctacagattcaatgcaatccctatcaaaatatcagagacattcctcatagaaatagaaaaggtaatcctaaaatttatatggaaccacaaaagacccagaatagctaaagccatcctgagcaaaaagaataaaactgtaggaatcatattacctaagttcaaattatactacagagctatagtaatcaaaacagcttggtactgagataaaaacagacacacagaccaatggaatggaatagagaacccagaaataaatccatacatctacagtgaattcattttcaacaaagatgttacaaatatatattggggaagggacagtctcttcaataaattgtgctggaaaaactggatatccacatgcagaagacactagactccaatctcttgccatatgcaaaaatcaaataaaaatggattaaagacaaatctacgacctaaaacaatcaaactactaaaacaaaacacgggcaaaagtctccaggacattggtctgggcaaatatttcttgagtaataccccacaaacacaggcaatgaaactaaaaatggactaatagaatcatatcaagttaaaaagcttgggcacagcacaggaaacaatcaacaaagtgaagagacaatctactgaatgggagaaaatatttgcaaactacccatctgacaagggattgataaccatagaatacataaggagctcaaacaactatataggaaaaaaatgtaataatccaattaaaaaatgggcaaaagatctgatagacatttctcaaagacatacgtacacatggcaaacaggcatatgagaaagtgctcaacatcactgatcatcagaaaaatgcaaatcaaaactacatggtatcatctcaccccagttaaaatgacttttatcccaaagcaggcaaaacaaatgctggtgaggatatggagaaaggggaaccctcgtacactgtgggaatgtaaattagtacagccactattgacaacagtatgggggggttcctcaaaaactaaaaataggaactaatatatgattcagcaatcctactgcttggtatatacccccccaaaaaaataaattagtatataaaaaagatctctgcatttccatgtttattacagcactactcacaatagccacatgaccatcaacagtcatgcagtagtatttagccataaaaaaggatgagatcctgtaatctgcaacaacatggatacaactggaaaaccttattttaagggaaataagccagacacagacaaccttcacatgttctcactcatttgtgggagctaaaaatcaaaacaattgaactcatggatataagagagtagaaggatggttaccagaggctgggaagggtagcagaaaaaaggagatggttagtgggtacaaaaatacagttaagatgcaataaatacaatctactatttgatagcacaactgggtgaatacagtcagcaatactttgttgtacattttagaacaactgagagagtacaataggaatgtttgtaacacaataataaaagcttgaggtgatagatacctcacataccctgatgtgattcttacacactatatgcctgtattgaaatatcctatgtgccctgtaaatattaatatatacacctctatatcccgtaaaaattaaagagaaaaaaatttaaaaaggtgaactgccaaggcttcaaaccttctactgcatctcccggacaggagatcctaggcaagttatttaacatttctaagactcaaaccctcatcttgtcacttgggaatgacagagatttctacaagtgttgtgaggactaaatgaaatgctgaacttacaggctttagcacagaatctgcacaaagtaagttctcaataaatgctgactgctattaattcattttactaaataaagagagacattttaatggcaatatccaatactagtgagtatgaaaaatcaaaccctgttgctattgatggtgctgatttgataattctcctttttaagttgtagtcatggttatgatttattacagcaaaaggattcaaagcaaagtgtgcaaagggaaatggggcagactctagaggaaactggtcacagctttcaggagctgtgtccctgtgcagtcacacaggctgcacttcattcctcctgcaacaaattgcgacaacacacccacaatttgtgaaatttcacaattgtgagacctcgcaattgtgagaaatgtcttctagataaagacctagtgcctagggttttttactgggggctggtgatatgacaattcttctgcaaagtaattcagaagtatctagagctccccctctgtgactcagtactatagaaaacaggcaaaagcacttaatgcagatacgctgatgttaataataataaattagaatctaaatggaaaataggacatgagagactagtaacatagaacatttctactaaaacaaaatgtgaaaaaagcagaaatatataaaccttataataacgatgaaatccaatttcattaaataaacaagtaatcagtgataactctatgtataaactgtttttgtcttttcctttttctaaactttgttatatgactaaatttcttctaaacttaaaaacagtattttaataaaggatatttcttcatgttgaaattaagatgtaaaataatgcacgtgtcttctttttgcactgtgcttccatctggcttccgttacacaccctcagaacctggacgtcaccaaagccagacgctcgaggtggtgccgttttctcccagcctacaccaaaatgttgatccctagctcctagatgacgcatcccatctaagcagaaactcaatgaatgctacttaaagaaacaaacatacaaaatatataacttggccaaccaaagaggaacctatttgtcaatgaatccttgaaaagtagctgaaaagaacacttggagaaaagagttaaaaaatatttttaaaagaatcacaaaaatcatgcagatttgaatgttatcgtaagtattaacagagagggcagtctacaccttctctgaaaggaaatacgaaagcagagatgcagggggacaggtgggcataagggtgtggagagctgagcttctggaaacaggcagaggctgtttggcgctctgaagagggtctgggcctcaaaccctcctctgctgctccttcctagctgggtgaccttgggcaagtcaacaaacctctctgggcctgtttgcttatctataaagtaggggtaataacagcacccaccttatggggttgttgggaggaagaccctgaacttagaagagtgcttgatacctagtaagggcttactaaatgttgctttttcttcctccaggactcatactgaagagacttgaattctctgtacaggcctggagccttcagtgggagaggcacacaaataatctcttaaagagattgccccctcacaattacatgagctcttatgcagaacacctgcctctatgctgcaacagattgaacgtttatgtctccccaaatgcctatgttgaaattttaccatctaaggtaatggtattaggaggtggggcctttgggaggtgtttaagtcacgaaggtggagccctcatgaatgagatatcatctataatcacctataatctctctcccagagagctccctcactccttcctccatgtgcagacacagcaaaaaggtgccacctatgaaccagaaagcagtcctcaccagacaccgaatctgctcatgcattgatcttggacttctcagcctccagaactgtgagaagtagatttctggtgtttgtaagtcacctaatatatggcattctgttatagcagccccagtagactgagacatatgccttggttctctgtcactcaccaggagcccggcgtcttcttactggctctaccatccagggtgctttccctttctccaataaggtgatcacatttggtctccgaaaggaaagacctgtacgtgggacaaacatgggaaatgatcataaatgtgggcaccacagaagtcagagccacgctctgcatcaacaggaatgcaggtttagtagcatgaagggagcacagaggatgtgaagggcagctggagaatggggagtgtgatattgtgatttataagaatatgtatttgcttttcatccctgtttccggcacacagctccttaaaccctgggaatctcctgcatatgtgtcttttctatgttaatgagaagactgtgactgggggctcctggacagccttcagatgggggctggttgccgatcatgtgattagaggattggaactttcagccccatctcctgacctctggggaggggtcagaggctggaggttgagccaatcactaatggccaatgatttaatcaaccttgcctacctgaagcctccttaaaaactccagtggactgggtttggagagcctcagggttgctgaccacgtggaaggtggtgcagtagagggtgcatgctctgtgtccctccccccataacttaccctctgcatctcttgcatctggctgttcaactgcatcctctgtaatatcttttacactgagttggtaagcataagtaaagcgcctccctgagttctgaaagctactctagcaaatgactgaacttgaggagagggtcatgggaatccgctaatttagagctggtcagttggaaggcctggacatgcaactggcctctgaagtaggggacagtcctgtgggactgggctcttaccctgtgggatctgacactatctccaggtagacagtgtcagaattgaattggaggacacccagctggagtgtgctagagaactgtttggtgtgtgtgggaaaacctccaaacatctggtgttagagtgtgcggtgttgagtttggttgtttaaatctcacatggaaaggcaggaatctaaattatagccagtagagttgttaaattttaattcgacaaagcaaactattttcctgagaattgagtcagaaactcctgaggctggttatgaagttactgtctttctgctccagaccctcacccttctattatctgttttgtggtgccagggtgggggccttgctgtcttcacttctgcttcaccagctgcttcctgtcaacatccaccaataggggctttgttggtttctatgtctgggttttttagttctgtactcccagaaccagtttcatctggctcctcagaagtataaacaaaccaggcagcacactgccccctccttcagaagttctgagtcccagatccgaggggaccttccttaaagcgctaaaaaccccaaactcttccctttgtccctccaaccccaggaatggtggcagcatcctgcaattactgtctctgtgttacatcaatgtccactattcacctttcaacaacacctcttaaatcaattccttaaattctatcaaaagagggctgagtgcggtggctcatgcctgtaatcccagcactttgggaggccgaggtgggcagatcacgaggtcaggagatcgagaccatcctggctaatacggggaaaccccatctctactaaaatacaaaaaatcagctgggtgtgatggagcgtgcctgtaatcccagctactcgagagactgaggcagaggaatcccttgaacccaggaggcggaggttgcagtgagctgagattgcgccactgcactccagcctggcgaaagagcaagactctgtatcaaaaaaaaaaaaatttataccaaaagaattcaagagttacctacagagtttccataagacccagcaattctacccctaggtatatgccccagagaaatgaaaacatacatccacacaaaaaatttgtatatgttcatagcagcatatcaaaataacaagagtgaaaacaacccaaatgcccatctattaactgatgaatggataaacaaaatgtggtctatccataccatacatattctttggcaatgaaaagaaatgaggtattggcacatgctacaacatgatgaacctcaaaaacattagaaatcaaagaagccacatatttatgatttcatatgtatgaaaggcccagagcaggcacaaccagagagatagaaagtggactagtagttgctgaacctggggggatgagtggccaggggagacgaagagtgactgcttatgggtactgggtttttgggtggaaataatgaaaatataattgattgtggtgatggatgcataactctgaatacactattataaaaaccatttaattgtgtactttttatgggtgaattgtatagtatgtgaattatatctcaataaagctcttttaaaaaagaaactgcagtggcttccattttcctgactagacccagagtgatgcatgtccctcaataggctggttctggattgtgggggacgaagagccttaccaagcgagaccaggttccggtaattctccaacatgacatcttcatacaaatccttctgaatggggctcagccattcccactcctcctgggagaagtagatggctaagtccccaaatgttataggtgcctgaaatgaaaaatcaaatgtctattcaccatggacttgtgcttccacatggctggaggaaatggtgcacacatcttaaacatgggagacacaaggtaccaagaatcattcaggaagcattcagggttctgaggccaaaaggggcaggtgtattaaataagttaaataaaatacaatataagacatagctgttattaaaattatgttgcattaagaacacgtggcaacctggatctaccaggcatttacaaagtcaaagcattcttctaagcacctgactgtactggctcacttagtgctcatgtgaatcagtgatagaggcactgtcagcggaatcacagtatgttacagatgaggaaactgaggcccagagagatgagaaaacttactgcaggtctcacagctagtaaatggagaagctagtgttcagcccagacagctcctgatttaatctcctaaccacttgctctccaagaaacatgtgaatatgttacacatgacaaaaggttctttgagggtataatcaaggttactgatcacttgaccttggcagattatcttggacttgacctggccagttggttattggttcttgctgtcttgaagatgaaaaatgagggtcaggtggaaagtgtaggaaggaactgaatctggccaataaccagcaagtctggaagaggacctgagccccaaatgagaacacagccggctgacaccttgatttcagccctgtgaactccaaagcagatgacccagctaaaccatgttgtgcctggacgccaaccacaaaactgcatgataataaacacgtgctgttttgagctgccaagtttgcagctaatctgttacagcagcaaggggcaactaatacacccaactgaaagcaaacacatttgttatgggaaactgcatttgagatgcctgttggaaaaaccactcaatgattgacagtcgtggagcatgctgaccacaggaggctacgcatacaacctcactgcctgcaccagtgcagtcaatggaatagcagggctatgtggtgccttttagtcttgggaccttagttaaagagatttcctccatgtaaatatgggttttacaaggagatacaaaaccacacaacaagactaactccagagcacatgtcaagtcccctctgctactgcaggccccacctgggcattcatctccatgctgagaaatcacagtggctctcatcttcctccacggaggacatttctcttggggagggcatttctcctggcactggcaaagcccctgggaatgctaaacaaacaggccagtggccatgtgcacactgggaatggagagaggctcgctgagcagtttcctggctgctgggcccttctcaggttctcatccctcatggcaacgggagaaaaccaaagactaggtgttggatggatctccaacaggcaacaagtctccatggaaggaaagcaaatggtccacatctcacaagacacgatggggtgttccggaaggaagaggaattgccacttaccttggatttggatttcccccgtgcagaaggcatcctttcctccccctttagggtccacactgagagatgggcagagagctggtaaggcagggctgtggggagaagacaggtcatgaggcagtgccagagtccacaggcccctacctaacctggagacacacacacacacagacacacatgcacacatatgcacgtgcacacacacacacagatgtcagaacacctggcgcattcctgtcccccctcacctgctcacggtcagggaagggcacggccaaccctttttgtgcctaagatcatagcaggttcttggtcatgaggcaaataaggactgcacagacctctggccatccatctgacaagtatttactgagcacctactgggtgtccagctgtcccaggtactggggggagagcagtgagttaaagtggaagagtgccggctcccaagcaccttacattccagtagggaaagaaagtccatataaagcacaatgatggacatggtcattgctatgaagaataaacaggccagggcaggggttagagtcgtggaatggtcagggaaggtgtctctgaggaggtcacattgagctgaggtctaaatatgagagcatgagccatgtgggtgctaggggaagagcattccaggtagaggcacagcaggtgtcagcgtcatgggtgggcgcaggctaggtgtgaggagagcaaggtctgtgtactgaggcagagtgagtgcagcggggagggtgggctaaggcaggcagggccggatcatgaaaggggtgctgagcagctgggatttgatctcaagtgtgacatcactgggggaggagggggagctgagaaggggagtgacaccatcagacaacatttaacaaaaatttgtggcatgtctatatggtgggttaactgtgtgtcagaagagggagcaggagtgaggacaggactcactaggtagctttgcagaaatccggggaagatgttggtggcatgactagggtgggtggagtggaggaaggaagatgtggtcagatcgcctcctcaagagggcccctctatccacccatctcaaagaatctctgccctgtatcagtctatacctatgctgtccaatgtgaatgccactagccacatatgaaaactgagcacgggaaataaaactagtggaactgaggaactcattttcttccctttttttttcttttgagacagggtcttgctctgttgcccaggcgggaatgcagtggtgtgatcttggctcactgcaacctcaacctccccggctcaagcgatcctcccacctcagccttccaagtagctgggaccacaggcacctgccaccacactcagctaatttttgtatttttcagagacagagttttgccatgttgcccaggctggtctcaaactcctgggctcaagcaatcagcccgcctaggccttccaaagtgctgggattacaaacatgagcaactgtgcccagcccggaactcattttcactccaatctattcactattaaaacaataataaaataaaatttaaaattattgctaaaattattaaaatttactgtaaatttaaaatgaaaaactgatactcaatttggttaccgtaaaactttaaagtatgtctggaacaacttgggtatgtgactctgcttttccaaaggttttaggaaattaagtacagatcaggtatctccactgaaaattaagggtctagatggaccgtgtgtataaaatttgtatcagatttcaaagactcagtatgaaaaaatgtaaactatcagtatgaaaaaataactatttcattgataactgtttatattggctacatgttgaaatgttaatattttgatatagtcagttaaatgttattaaaattaactttaatgggccagcccaatgctttgaggctgatgcaggaggatcacctgagcctaagagtttgagagcaacctgagcaatgtagtgagaccctgtctctataaaacattaaaaaattagctgagtgtggtggtgtgtgcctgtagtcctagctacttgggaggctgagatgggaggattgcttgagcctgggaggcagaggttgaggtgggccaagatcatgccactgcagtccagcctgggtagcagagtgagaccctgtctcaaaaacaaagcaaaacaaaacaaaattaactttaatgataaatgtgttgctttttacccttttcaatgtagcctctggaaaatgtaaaattatcagcctcacattatgtttctgtggggcagtgctgccacatgctctcttattgtattgccccattttccacatagcacttaccgctttctgaaaacagcttctttatgtgggtgtttatgtgggtagtacctcccccctccctaaacacacacaatgatctaggctggaaagcagagactttgttttgttcaccgctctactcccagggctgagaacctacctagcatagagcaggtgctcaataaacacttgttgactaactcaaccagatcctcagtgtgctgaaaccccatcccagagacacagttctgctgcagccattccctggccctccacatttgtctttggagaggacagaaatggggacatacttttcacttcccttactgtggaaagcttgacatcttgagaaaatgatacaatgaatgcctaattactcttcaccaaatgttaacatttttcctacccttttttataaaaaggcagttgtctgaaagttgtagaatgacagttcatccctaaatgttccagcacacgcctccaaagaatgccatcgtcataccctgctgccaacaacagcagaaatatccccaaaagctttttgtgactttgtaatgaaaaaagtacagcaggacacagcctggaaaatggaaataatggatgttccctctacagatgtttgtttcgtccccgtaggggtggaggtagaagaagataaatccaaggccatcaggcttgagttcagagttaggtaatggatatgttttgatacaaaacatggatcctaagatggccttatcctatttaagagaagctaggcagaagaatgcttggattattacatgtctctctttgtaggatgaagttgtagtaagaatacgaatactaagatgaattattaacaagatgaataaatgttccatgtgctaagcaacactgaggattatcatttcaattctcacatctggtggcaagtccagttctgacgccgttttccagatgggaaggtggaagcacagagagggaggaatcacttgcccaacgtcataaggtagaccagtggcagagccagggttcaaacctagacatttgccccaaatgcctggctcttaaccctactgtgtggcaccctcccctctgcccatgtcagaggaaacaagctgagcagagaagatcagcagggcaggcttgaggctgctctcccaagaggcctgtgtgcagggtcagccccaggctggcgtctaaggacctggctgggagaccattccctacacggatataaaacttttcctgactgttaagaataccttcagcttcatggtgtggtgcagggagcatacaatttacgccttatgttgaacccctgctttcctcctgggagtctgcaattttgttatctgccaaccagagaatgccgacgtaaccagctcacaataacaaatgtggacactgagtctctaatgggcatgctgtgtagacagcacctcgcatgtgttgttctaactcgttactaagggaattagtatgtcactcaggactgcactgggagaggactccagggagcctggccctggcttccccaggctctgctctgtgcacccttccctttgctgatactgctctgcattttttggctgtaataaatcattagctgtgagcatgactacaggttgggtcctgggaggccctcgagaatgctggaacctgggaggtggccctgcagactccgaaacataagccagtaagaggtaacccccactctatcacacccctcagctgtatcagccttagaatgaggatccagcgaacagtcattctgcaacagatggagttgaggtgggcacatgatcaatgtcctggccccaatgggaggcagctggaggtgtggtttcccagcccctcaggatggtgccctgagccacaccccacttctctggtgctcttgttagagggacccctggttaccaggcctctggtttaataaaacatgactagagtgactctgtcttaaagtgagtagctaggcgctcacaaggcccctgctataaggttaatgcttacagtatgaaagtagccacatcctgagctgaccacctattacaattacagaaaatttatagacacacagaacatctcccaccaagcctgcagaatgtccagatgtcctgagagtgcagcccactttactcagagataacatcaatgaccaggcttaggctgaaggatgaatggtcattgatagcacaaacagccctacctttagtgagtgcatctgcacattccaggtttaatgacagctccttacagtttcccattccttctcctgctttctgagaacaccctactctataacagggtagtttccaataaacttgcttctttcactgtgctctgtgactcaccttgaattccttcctgtgcaagatccaagaaccctctcttatggtctggattgggaccctcttttccagcaacactcactgggcaagaaggggcggggtcccatgcaggtgagccatggtccaggaggggcctctaattagcactgtgtgccatgccggccacatcatgctaaggggaatacttgacttcatctgcctgggaatggggtgggggggaaatgagggcactgtgggcattagtgactgtggtagaccagagttatggccacccccccaaagatatggacatcctaatctccagaacccatgaatatggcaccttacacagcaaaaggaactttgcagatgtgatgaagttaaggatcttgggggcgggggaaattatcctgaaaatggaaaacacacaaaccatttttcctctgctgtcacaccacaacaatccatgaccacatgtgtgaggagttttccacacaccaagcaagcaatcatttctgcagcggccccagctgggtgtcctccaactcaattctgacactatgttcctggggacagaatcagatcccagagcttgaggtctcagcccccaagactgccccacctgccccaccttcagataccagttgcaagtctggacttcaggaatgtttgactgactggctttaagctggggttcccacaatccccttttgggttcaattattaataatttgctaaagcagcttacagaactcaggcaaatactgacatttactggttgattatgaaggctattccgaagaatacagagaaagaaatgtgtagaaatacaaggtatgtgtgaggtggtgtggagcttccatgccttccttgggaaccctccaggaacctccatgtgttcagctatccagaagctcttcaaaccctgtccttctgagtttttatggtggcttcattacacaggcaagattaaactactggcccttggtgatcaacttaacctttagtctttctcccctccccagaggttgaagggtggagctcaatgtcccaactgtctagtcctgccttggtcttcctggtgaccaaccctatcctgaagctacccaggggctgccagccaccagccatctcattagcatacaaaagacatgtaaaagaaaagggcatggtgcctcacacctgtaatcccagcacttcgggaactgcttcaggcaaacctgtttcccattttattactaaccacgtacctccctcacaatatgcccaaaagaaaattctttttggacagaggacacacagaactcatgagataaatgcatacctgattgctccctttgccctatttcactaagccagaccaaggcataagtgactactcctctaccctcctgtcacatgtaaactgtgtgttcagtgaaaggctcatcagagacttgaaggaatgcaactgtttgtctcttatctacctatgacctgaaaggcagggcccttgcttcgagttgtcccacctttctggaccaaaccaacgtacatctcacacatactggctgatgtctcatgtctcccaaaaacatataaaacctagctgtgccccgaccaccttgggcacatgtcaggacctcctgaggctgtgtcacaggtgtgtccttagccttggcaaaataaactttctaaattgactgagacttgtctccgatattttgggttcacagacatcactttagaaattgtaagatttcaggagttttatgccaggaaacaggctaaaggctaaatagttatttctcaatagcacaatcctggattgcccaagtgggctcaacataattacaaaggtcctctttataaaacggaggcaggaggatcagagtcagacagaaaaagaaattgcaagatggaagctatgctgctggccttgaagatgaaggagcacctgctgccatggcttcgtagctctgcctttcaggactgtaagagaataaatgagtgtagcttgaagccatcaagtttgcggcaatttgtcacagcagcaagaggaaatgaacacagtgacccttccactatttccttccagtcctcatgcccaataaatgggcttcttttgtcagtgacctggtgctgaaaacatctgtaattcaggggaattacagggctagggtgagatgaagaggtcggctggtgatcgctgaagccggcctgtgaggccactccaagaggcagaaaggagcgctgaaacatcagccctgcctgcctccctcttgcacacgtgcacacacacccacgcacgcacatccagagctccctcatgctgaggaagctcagggtcctgccttgttttagccagggtcagagggaagggtgaggcggcccccagtggtggtaaacacatcactctggggtcagactgagggtggcaagtgttcctatcagctgtgttaccctgggcaagccactgaacctctctgtgccacagtttcctcacctctcaattggggacaatacagaacctacttctggagggagttgtaagaatgaagaatcacgtttgggtcctacacccccacccccatgccagtgcctccctgctagtccctgaaggggctgccacagccccacctcacttccttcagtctgctcaaacctcaccttctcagcaagcctcactaaccattctatttaataatgcaagctgccccccaccacccttcacggctggttcagatattttttttcagcagctcttatcgtggtgtaactcgctgcagaatttgcttattatgcttactgtcaaccgtcctgaggacaggcaactctgtattccaagtgccttagaccagcatccagcacacggaaagggcttaagtgtttgctaactgaatgactgaatggctttgtaataaatattaactttctttaccaacactttttcaaggagccttccctcacccactaaaccggggtaggggtatgcttcacatgtatcaggtgccacttcttcacagcggaaacacattccattgtgagcacatttgccttctggctttatctcttgtcctccaccggacaatgcattgaccaatgttctcatgtgtgcagctgtgtgaccttgggcaagttactgaaccttgctgggtctttacctccctcctttacatctgcaaagggaggacaaagggctgctggaggatgagatgagatcatatcagtcagtgctccgttaaggtaaactctatttaccctcactgctgttgaggttacaagtgccaggtggggccagttctgtgggatgtgagtttgggaaaaggtcgcattgaccgtccttagcccacatgctctatgcacgtgctcaggtgtgtgtgctgaatgtgctccatgcctgggcagcagcgtcacctcctcagttaatgacgatgagaatgaaagctgtgctggctcctttctatgcatcacaccatctcctttaaccttgaatggcaaatcaaccacccagggtcctcatcttccatcgcggggatgagagagggacgatgacccgcctgttgtcacagagctttaactgatggagcctggatttgaggccctatccacaagccgcacactctgcactcctcacacatggcaggagtccactatccaccctggcagggcacgggaggcatcggtgtggtgaaatgcttccggaaaacatccccatatgtatgtttctgtcatagtagagtggccacaggagttggggaaaatttgagcatatcatgttaagactgaggagcgagggctcggtgacgaactgagcagactggccttcgattctgacttttctgagcgaggtttccttcgtacagagatggggaccaagaggcctgccctgaatcctggacacctgaattctgggctgtgttagaccctaggacaacggtgtgctggggaatgtttaataagcagcttgctgcaggggtgatttatagtgtttacaacttccatggagtaaatactctgatatggtttggatctgtgtccccatccaaatcccatgtttaattgtaatccccaatgttggaagtgggacctggtgggaggtgactggatcttgggggtggatccttcgtgaatagttgagcaccatccctttggtgctgttcccgtgataagagttctcacgagatccagttgtttagaagtgtgtagccccaccccccctgcctctttctcctgctcccaccatgtaagacacctcctcccactttgccttctgccatgagtaaaagtttcctgatgcctccctgaagctgctatgtttcctgtacaacctgcagaaccgtgggccaattaaacttttctttaaaaattaccagtctcaggtatttctttatagcagtgtgagaacagactaatacacactcccaccacagcaggttgtaagctattgaactgatgtcacctggcatggggctgaatggcttgggtgagccagctccagcacaccactgctgcagggcctttgagaacaaagccctattctttgcctgggaattcttaaactttgggcagatatccctgaagagtacaggagggctaatgcctatttctatggtttgagatatatcccaaagcagctgcccataacagaaaactcttttgatttcttgttttgaaacacgttcatttgtgcatattacttcataataaatctgggtttgtgttaatgtaaaaatcatgttttaaatgatttaccagataagcagatcagttggctttccccttccaattacttaggtaaaatgacttgttccaggaagttgtaatgcattcatcccgcagttttcacaggtgtgtgcactcagccacgcaccccaaatttgagaagatgattcttgtctgatatggtctggctgtgtccccactcaaatctcatcttgaattatagctcccataatttccacgtgttgtgggagggacccggtgggagataactgaatcatgggggcggtttcccccatgctgttctcatggcagtgagtaagtctcatgtgatctgatggttctgtacagggactctcattctccctgtggccatgtaagacgtgtctttcaccttccatcacgattgtgaggcctccccagccacgtagaactgtgagtctgggtatgtctttatcagcagcacgaaaacagactcatacattgtccataaaataattttcttcaaggaactcggcactactggggaagaaagaacagcagtttgatattaggtaatcctggattcaaagcttgcctctgccaattactggctgtgaaaaagttacacaaagcctgtttgctcatctatacaatggggtaaagaaaacctacctcacctctgctgttaggatatttacatgtgatgtcttcggtaactggaacatggtcattgcttgccttccttttccttttcaactcacaatacagttgacccttgagccatgttagtttgaattgtgagggtccacttatatgcagatttttttcaatagaagttacactgagtgtgcctacctctccggcctcccccttccggctcctccacctcttccacctctgagacagtaagaccagctcctcctcttcctcctcagcctactcaacttgaaggccatgacgatgaaaaccactctacttcatgaacagtaaatatattttccttatgattttcttaataacattttcttctctctagcttattgtaagaatagagtatgcaatacatgtaacacacaaaatatgtgttaatagactgtgtaggttattgcttaggtgtcagtaaggtgaccagtagactattagtacttaagtctttggggagtgaaaactctatgtggattttctacagtacagggggttggtaccactaacccctgcactgttcaagggtcaaccacataccaagcatccaagagaccaacgaagactgagacccactaaaaaggctgagattagaattcttatccagtgctggaggagataaattggtgtaaattcaatggagggcaatttggcaatgtctttaagaccgaagatacacgttatttacccctgttgtactctttaatccagcaaccttatttcctgtacatgtcttcagacatctttgcacatgtgcacaatgagagacacacaaaggtattcacaatggcagagtttatagaaaggggcagtacatttccttgggtaaggggtgggcctgcagcaggctgtctatgttcagtatttaactctgccgtccgctatctgtgtggacttagacactctatgtgtcctctcccggcctgagcttcctcatatgtaagatgagacaaaacacagtaatgacttcacagggttgtggtgaagatcaaatgagtcaaaatacgtaacacatttagagtggtgccaggaagcagggccaatgctaagattttcattattactaccaccatcaggagattggaaacaacctaacagcccatcaataggagaatggctaagtgaatattacatgcatataatgagacaccacatattaaaagaaacaaagtagaaccatagtagtgattcctaactgggggtaattttgccccctatgggaaaactgcaatgtctgaggctatttttggttgtcacatctgggagtaggggtgcccctggcatctagtgagtggaggccagggatgctgctcaccatcctgcaatgcacaggacagccctccagagcagagaaggatctggttcaaaacatcaactgcgccaaggctgaaaaacctccaagataaaatggtattataagggcaaaaacatagaaaagtcatttagaaaaaaacaaaatatagtatacaaatacatgactttgaaaaggctctggaaagataaacaaaaagtttgtagcagtgactgtccctgaagaaaggaaccaggttatatgtgtgagtatggaaaaatccaaaacccgctttggcattttgtgtcatgaacgtataattacatcttcaaaacaacaaatgaaataaaagaaggctggatcgcacataccacatcaaggcagggctgtaaacctggctcgtcttccgagtccctgatgatagatgagaaagggctttgaaaggcacaaagctatgtcctcctgaggtgaggacggctggaacctggatgggaacatgcttcaaagagttactgaaccgtggttgtgcctcccttctgaggcaaataactgaggggccttcccctcctgccctggcacccctttgagccttgggggctgtgctgggtattgaattgggggagggtcctgatatactgaaaaccagccattaaatgcactgccacagcctcattgcctcctttgggccagtcagcttttgctgtaccagctgtcaaatattcaaaaatcactcctggcctgaacctgccagccccagaggccagggacatacgtaggcaatttctccaaagacgtcagcacagctgtcacaggaagaacacaggctatgcatatgcatgtctagcctgccatttccccactttgcccgggaacacattaggttacctcacttgcaggatggggctaggaatacccctactgcagggaagtgcagctgtgaggactgtttttgataagatagccaagcagaggtcacttgcatcctccccctgactcctccaaatcaatttatctcattcccagaggccccaaaggagcctgagctgcaggcactcagagctgtagctcttaaccctgtgcgtacattagtctcttgggagctttctaataaatagtcacagctgatggcagttcactatgccagaccaattaaatcagaatctctggggattgagtctgacccgcccttttttttctttttttaaataaagcattccaaggtgagagtaacattgaaggcatcgtttagaataacgttcgagtctcagagtctcaaggacagggctagagatctgacctctttctgttgaagtccagacctcagtgaagagaaaagtctttggttaagatcaaagtcaaactcttagattccccaatcaagtgataccaaagggtcactgctggtggtccttcctggctctggagttgaccaaaatgcccatgggagacctggatgttgactccaaaaagaacacctgccaaacaccctgtaatccctttaccctgctttacttttcaaagtacctatcagcacctattatagactttatttttgtctctcctactaaatgcaagttccagctgagtaaaaaccttgcctgttttgttgagagactagcacagtgcccaatccatggtaggcactcactggctgaatgaatgaatgcatctcggagcttacccgggctgcaggccgtttcttctcatctcagaacactatccttttatcatctctccgtgccccgccttccccagctcccttactcttctccctgtcatcatgccttcggtctgtccatgcgcttgcatcacggtcctctcaatcagagtgattttgcccctgcaggggacatctgacagtgtctggagacatttttttttcgcttgtcacaacccagagggaggcgcggtgtgctactggcctggtaaatagagcccagggttgctgcacaacatcctataatacatagaatagcagcccctcccacctcccaacaaaaaactatctggccccaaatgtcacagtgccaaggctgtgaaacactggtctggacagaaacatttccagacccatgtgttatatggaaacatcccttagtccctgacacttcaaagttctgttcttgaccccatgggctccctagggacatctccatcaggaagatcctttgttcctgaccccacctcctctaccctaatgctgccctcccaggaccctgcctacacaattctgaacctaagccctgatctagacgtccaagttattttacctctggacctgcaacccttactctggggctcatccttttgcatttctacctatggattttattctccaggtgtgggacgcctgcggttattatgctaataataaaacgatgatcattgatgtggcacttccttgtgccaagttctacttatgctcaccataaacctgaggttggttctgttattactactgttttacaagtgaaccgaggagtggtggacttaagtaagctctctcagtcacacagccagccagtggtgaaaccaggagtcaacaccagacagcggggcgccacagtccatgctcttatttttccaagctaccttggtaggaaggggacacaaccatacttagcgtcagtggagggctctgtcctccactcaaatgtacacatgcagaaaactgacgacgcaggtggttggcgggggcagcgcaccactgctcaactggagatggtcagatgccctggtatgtggacaaagatagcccagtccgaagctcagagatgcaaagtcctccagtattcaccactacctctgcctctgtatagggtcaaagaaaaacgaccaccagcaccataaccaacacctaaacacggtgattagtatgtgacaagctctgtgcagggtgtttcagctacgtcatcccatttaatcttcccaataacacccaggcaggtgctattaatatgctattttaccaaggaggaaagtcatgcacaattaaacagttccacagatttccagggcagcccatcacatcttagagctgctaagaattcttcccctgtgggcctccatttccatggttacagtgagatatacaccagaaaggcacagtcacacactcataaccgcaaagccactgacgctaagtggcagacagacgcccaggcaagtcacacagtaacccaaggctacaataaacgcccacatcagcctgacactgacacacgcacacactccagaaacacaaatcttcacagtcagcgtcacacacccactcccggcttcccaatggctccattgtttccttcgcgtgggtcacgcagcgatacacatccgcggtcccgacatagctccctcacacacaggcacacacggctcgcctcacacgcggcgccaacttcacacttgggcgcacaagccccgagaaccacagcagcgaagggcgcaaaccccacgccgtggcgggccgagaacccacgcaggcgcgagcccaccgcccacgcaagcacccgcgcagacgcccacgccatcgtggatgcgcaaacccacgcgcgccttggcaggaacgtccacgcagtggcgggcgcgccgcccacgccctcagacacacccacactctcgccagcccccttacctcggtcttcccgggctcagaccccggcggcgaccaccgagacagccgagcagggactcagcgcctgcgcactcccctccgggaccccgggaccgcgcgctgcaccccccttcacacacgcaccacgcatgcgggcgcgtggccccgcccccaaacaaggccacgcggcgtgcgctcacccgcctctcggggacagtaccaccagccccggcctgaggccccgacccctcagcgccacacgcacaagcgcgttcgcacgattggtgcaggcggacgcgcgaggtcccgcgcctgcgcacacccccgaggctggcacgcacaccggtctcctaggggactggcgcctggccctgcttttcatcctctcaggagatcacgtgtggacactgaggcccttcctcgagctctttaaccaaacccaacctccccaattcgccgccttccccgctcccacaaccacacgttcccgtgtgagggcttattgcctccagccagccagcgtccttcgcccccacattcacgaggtttggagccggcctcacccgcggaggcggacaccgcccacccgcgcgtgcgcactacgcagtcatcctgcgacctccagaatccaccggggtgcagcgaggctgtggaaagtcccacccagaacgtgaggtgaagaaggcttgggctgcgctggttctgctctgtccgggtcggagatgaactgacccgggagagcagcggagggatgtttcttttggccaacagtggggactcacctgcacgttttgcgaagaggcccacagtcctttgcgtggcgctcggactacatttcccaacggcccctgcacgccctgggggctgttccatgcggtgttgcgcctgcgtagccggcgggctggcagtgagactgactgcgtcggggttgagactgggtggatgaggctcaccccggcggggagaagggacgaggaggggcggacagcggaaggtccgggagtgtccgccataaagtcgtttgaggtgaccgttgcgtaattgtgagtctgtgagagaagatgtgaagtatggcctcgtcccggtcatctgggcgtgcgggtcccgggttttgatcgcgcgtttgtgtaggtgagacccacattgtgttaccctgaacatgtgtgaggacgaacctttgtgttttcttatacgtgtgtctctgaggcgatttttgtggttttgtacgtggcggggggcactgattttgaatatgtgtgtatgttctggacatttgtttagcttctgcatccacttctgcggaagggcagagttgagtaggtgggaacaggtactgtgtggccccacaaagcctgaactatttactgttgactctagagcccagtttttgcggtgtgtacgtctctgtggggaaccacacattttgaatatgtatacttgtgtatatttacgtctattctatgactgcttttgcacaatggcagggttcagtacttgcagcagagatcttgtggcccataaagcctaaaatactatccgactaaggtttcgagccgtagccagtttttgtggatgagtgttgtgtgtgtgtgggaagccagtgattgattgattgattgattgatttgggacggagtctcgctctgtcgcccaggctggagtgcagtggcgcgatctcggctcactgcaacctccgcctccaggttcaagccattcttctgcctcatcctccctagtagctgggactacaggcgcccgccaccacgcccggctaagttttttgtatttttagtagattcggggtttcaccatgtgggctcttgacctcgtgatccgcccgcctcggcctcccaaagtgctgggattacaggcgtgagccaccgcgaccggccaaggaaagccagtgtttttgactctgtgtgtgtgtacccgcctgtgtgttgagacccagtttttgtagttgcataggtgggtatatgtgtgaggggaacccagggcctgtgatttctttcttcccaggtgactctgagcaagttttggggactaggtagtagggagaatgtgtgaggaactagttttggtttcccatttctgtgattaggtagtagcaataataaaaataaaagctaacagatactactattaggacttttaccattacctctgtgactagcagctagcacttactgattgttgtccctggtcaaaagtgaatttttccatttaaggttttctttaatcctgtaagccgttctctgagttgttccttggagcaagtttctttctagactggagattgttctaaatacctggtaatactagaataaggggtgtggtcaagagatccaagaaatcttaggataaatctgtcacttggcagtttctttgttttctttaaaccacctcccaagaaagtatgtcatcctttctgctgttttaggggcatgttagtgcgaaaatctgggaaaaagctttatgcctcagactgtcctagttcagagaaaccagagtgtgtgggtcggatgtcttggctcctgatcaggctctgttgtgcccattctccgaataaagcaactatctcccaagacacccatgagttttctaagacagtttgtcccagagcccaggtccagaatctagtcctggtcttggatttggtcagaccttccctcactctcacctcaggactccccaccacttccccccctgccccaggaacccatgggaattacaggcataaattaaatacctgatcctatgacagctccagagtatctggaatcttttttttttttttttgagacagtgtcttgctctgtcgcccaggctggagtgcagtggcgtgatctctgctcactgcaagctccgcctcctgggttcaggccattcttctgcctcagcctcccgagtagctgggactgcgagtgtccatcaccacacccagctaatttttttgtacttttagtagacacggggtttcaccttgttagccatgatggtttcactctcctgacttcgtgatctgcccgcttcagcctcccaaagtgctgggattacaggcgtgagccaccacgcccagcccaagatttaatttgttaaaaaaaaaaaaaaaaaaaaaaaaagtagggtaaagacgctagaaagtctagagaggaaggagggattattttacacaggatggtcaggggaggccactttgataggtggcatttagcagtgaggcttcctgaactcagcatgactgctccgcttggctcagattccagctctgtccactgtagttgaggaattatccctagacagagaatggggagataaagaggctcagcttgttaacaggttcccctctcacatgaatcttttgtccactgcctcaaaactgccccgatatagtttaatttcgtagtatgctattgtgtcatgctgcaactctttcagctccaaaagggatggcaccaggttcaagaggctgaagaagagactcagatccaggaaatgaggcataggttatatgtgagatggaacttacatacagagtggtccagtggtggtaggctgaacaggagaactgccaccgcctgcagaaagcatggactttgtatagcattttcacttaatactctcctcctaacagcatccacatggcaaccctcatttaacccaagacaaagagcctcagcccccatagggccagcgttccacaggacaggccagggactcatttaacccaagacaaagagccttaatcccctatagggcccacgttccacaggacaggccagggactcaggcatttatcatagataaagatgaatctccatgttggtcatatttggaactccgaacatgtattcaggtgcgtctgccatgctgggtcattttcagagtatgcttaagttattgctatcagtgtctaccatacacagttggatctaccatacatagttgcatctgccatatgctatgataggaagacttgtctagtacaagcttctgtatcatagcccatagcagaactcatatttgtgagtattgtttgaagggattaagcagagagaattgagtcaggatatcactggggaggtatacagtttatttgtgggatttcaagggcctgaattgtgacaacagaataaagttcttgtgggagaaatattttcagaggatttgagagcatggtgttgaagagttaaggaaacagcatatatcttttcgtgctagatgcttacatgcaaatgaatctccttatgctgtcacaaatgtatgcttctctctccctccctttcacttatcagtcacatcccactagtcctggagcttctcctaccctgaggtcaggcatgaaccctggtgtgtagttttgctcaaatgcttacgatcgataacccagttgtgcaccaggtttctttatatcttgaagttatctactgaacacatgaaaaataaattcagcaaattatagaaactacgagacactgctgtctaccctttgacaaacatttactcagtgttgtgtgctggcttatttgcattgtgttttgcaaaagtcttaaaatcacagtcatatctaggtttttttcaagcaattctcctgcctcagccccctgagtagctgggattacaggcacctgccaccatgcccggctaatttttgtatttttagtagagacagggtttcaccatgttagccaggttggtcttgaaatcctggcctcgatggtatacacattcctatggaaggcaagcattatcttgtgaggtacatagctgatatgatgcttctgcatggtcttcaaagaaggggggccttatctttcaagaaactgaatgaaactcttcttaaagcaaaaataaggctaaagagaatatgactgtttaagatctacaacttcatctgcttatatgtcccatctccggtcctaaagccaactctttcctcatcaagggtccaactttggcttgggagacttgtgtagttgagaaattgagcctgagtcacctcttccaataagtgcatatgctcggacttgagctctgcctgccctctgactgcaagagatgacagtttctttaaatgctccttttgatattcacgctttagaatgctgattaaggtatctgagattgttattttctctgctctttgcattagtagcactttttaaaaggcacctattccacagtcctaatggttgctatttctgctgtactaatcaaaggctagaggtactgcacatggcagggcattcttctgcacctatatcccatcacagtatataatcttagcaattgtactgtgaaagctggccaggagctgtctgtccttttgatgtccgtttccttgatgcttagtgatatagagcatttctcatatacctgcttgccatttgtgtgtcttattttgagaagtatctattcaggttttttcccattttaaaatcagattatttagttttttgctatcgaattgagttccttacatattctgaatattaatcccttgttagatgcatggtttgcaaattactctttcccaatctgtaggttgtctctttacctgcccaaggcttatggctgccagtgaattgatttgaggctgcctgccagtgaattgatttagggctgaggccattttagtcagccagcagtgaagtggtctgggacatgggaccctcctgtgtgggtggcagattctcttctggcctggggtggatctaaaatctctgttcatggccaccattctgtactcaggggccttgaggttctgcccagtgctgtgttttactgtggcagggcaagtacttgtaccatgcacgtttccctctccttcctttaaggccttccgtgctatgctgcctagggttggaagaagggaggtgaggccagtgggagagtatccttcttactgtcttcaattgtctttccttgttatgctaagaccaggtactgtgatctttcatctagtttccttagctcttgtgaatatattttcttgcatggatagttgttgaaatttattttcctgcctgggggtttgctgaagtgttccttcctgccatcttgctccacctctctgttccttgaccttttctagtgaccatgtcttctaccccatcagccactcaactaaaagattaccccacctgtgtttcattaataatgtatgtatttccaccatcatttcaatgtcacatatctatattttaagaaaatgtgcattagcagctactccatttccacagtacttcaactcgagaattacaattgagtgatctaccttcatcttactatccctttcctctcatgagctaatttacttcatagcccacattgagatgctgaaattaattactttagtcactttaattactttagtcacttctttgcattttttgctagagagaattcatctgataaacactaatcccaagtaaactcaactttaaacatgacaggagatgaaaccagaaaaccttgcttacttatctctctttaaccttaatgtccacttacaccaagacttgttgcctgagaaaacatcataccttatatttctgctttaccttcagtagcttcttccaatcttctctttcatccgatgaccttgaggcacatttaatgagtaaaccaggatgggtcaggaagaagttccacatttcccaacaggacaatcatccccctgccccctcccattactgtggatgagctgtccatgttcctgctgaagggcaaccactcatctgaggctcacttttctcactgctttgcttacttgctcagggtgtagctctaataattatgagcattgtctgctgtaataattatgagcattgtctgctctaataattatgagcattgtcttccacataattttcctactctcttaaatcattctagaataataaaaatgttctggaatttcccttaatttaaaaacactgttactctaagtcatgcatactctttaaacaactcccccatttctctgttccccatttcagaaaagatcctaaaaagagtagtctttgttctttgtctgtggctccttgataacatttttccttgaacacactgggcctctaacgccaccattgaaattgctcttataaatgtcaccaaaagttgtccatgatgctaaattaaaggatcaattagtccttcttctacctaaatctttaccaagatgtgaggttgctgatgaaccccccatccttgaacctctttttatttggccatttgatgattgacaccatcattttccacgtggattacttcaacaacttgttaactcattctgtcacttttttatagtcatgtattcttaacatatcaggtagattaattttataaaaccttaagtcagatcatgttctggtctcctttaacttctccagcgactttctacctcacaaagaatagaatccagattcctcacaatggcctagacaactctaatgaaaccccacactgtgatctctcagattccactttagtcccactggcctcctgtgttcttcctcaaacgtggctggtttgcttccacatcaaggttttgtacattgctgttcgtttacctggaatgctcttcccttggggagcccagcaaataggtcaatatcatcctctccttgaggtcttcccaaccaccccattgtagactgcaggttgaaaatggaatcttcccaccctgtgaagtcagcaacctcattctttccagtgcccactgtgtggtgagcatgtttaggctttattacagggtctcagatgaaggtttgacctgtaataagtcacatgtctgccctctgtttttctccataggggttctattcagcctctttggtgggataaacattccttattttcagtatatgtgaagaaagactcactccacagggctagggcctagatcagcactgtgagcagaagaaactctctaagaagaaaacgtgagagtgctctacatgatgaacaatatctagaaaatgagtgtggccaggcctggcacggtggctcatgcctgtaatcccagcactttgggaggccgaggcgggcggatcatgaggtcaggagatcaagaccatcctggccaacacagtgaaaccccgtctctactaaaaatacaaaaaattagccaggcgtggtggcaggcgcctgtagtcccagctactcgggaggctgaggcaggagaatggcgtgaacccgggaggtggagcttgcagtgatccgagattgcaccactgcactccagcctgggcaacagagcgagactccgtctcaaaaaaaaaaaaaaaaaaagagtgtggccagaggccagatggtttcccaagatatacactattcattaacaatgctctgttttcagaagtcttcttcataatcttaaaaatactccatttcttagtcattcaaagtcatgagccacttatgttattttataaagtcaaatatttttcttgtctcatgtcttagtgtatcaatagaagaagggaaattcagtctttatttctttcacatcctaatactagaactcttaccttttctcatgaaccatcctttactgtgatgcatatagttatcaagtacccatttatggctagtgttccattattggaatgctaagcatgtgggagttatatcctactgttcaagtcattgccaaggtctgattgcagaaattcaaaaaattgcaacctcaggcataaatggtaaggaatagttgctcattttattatctttcatggtctggaaggatgtgtgcttaatgacttgagttcagttcttctgggcttagtttcttgcccagtaattggctgattatctctacactggctcttatgtcctaggatgagaaccacaagagagaggacatgagggtaaatacaatggggaaaaagaaaacaaacagtggcagcagagaatgaagatgaggaggaaagaaaaaatgagaaataggaagagaatgagtttgttatgctcgtctggcaaacgtgtaatctgaataaatgatagagaatagtgtttataagagaatgctcttcagaggcaaatagactgtttaaatgccgttagatctgagtgtccttgatacattcttagcctgaaaactagaggaacatgggctggcaaaccaacactgacataaataaatggcaaggaatattaaaaaagaaaacaagttttgagagctacgggaacatataactttaggatattaattatttcagaaaaggcttttatgaagtagtgaatttttttcattctttcttgaatagttttatttttaaataagtttggattaccaaagagctgcagagatggtacagagtttctatatacacattccccagctttccttaatgctaccatcatatagaaccatggtaccttagtcaacctaaaaccttcacattggtacaatactctcagagaaactgcagactattcagatttccactgtttttccaagtattatcttttttagttccaggttctagtcacaaatctcacatttctttaagccatcatgtcccttagtctacttgggtctgcaatgattcctcagtctttatcttttatgaccttgtcactcatcaggatttttatcaaatgtccctcagtttgagtttgtgtgacttttgtgtgtgtgtgattagtctgagggtatgaatttttagggagattatatgctagataattttaagctgttttgtaaagaattagtcaaatcaatgcaaggacaccataaatttttctagcagaagaaacagcaacagcatagatggtgagtgggaaatgattatggtgtattttacctcttttaatccaacttaaatctctaagatagagctatctttcaaccaaaatgaccagctttcctaattttgtatatcacccatgtaaatggactagaacagaaatgatagattccccagttttccctcttttattttcttctctaccccataaatggttattaactgactctttgtgagatttgcaaaacagttctttagagtgggattgtcccaaccactctgagcaagggacaagaaaaccaagagaggctagaacagtaggtttcacaatagacgaaaactgccacctgagttcagacacagagatatactcctctcttctcatcctgtaaaactcaaaccttggttccccttgaggagagcccggcctttagctgccccaatgcacattgactgaactttaagctctatttcagccacttttgatggcacccatccctttctgtgcatgtctttgaatattgacgtgctccatccttgctggaatccaatttcctgtcaatcttggaatatataaatacttcttgctccatttttgaagccccctcaaagccccatcttccttcccacccattcctgacactgcctctgggtttctagaattcatcaaaattttccctagaattgttgatagccctcagcatgtatatgttaagctcttcctcaatacatgcatgaaatgttgccagaggaaataagaaaattgaataaataacatttgccacctaactggaacaatgaagaaaaggcagacagcgaccatccttgatcttctcactgggataacctttgaatgggacagtggaatagaaccattaatggagggaagatagctgtgaaatggtgtgaaagagagtgaattttggggaaagatggttacctgatgcagttcctcacatgctactatcaggacattcttttttcctctcatttgtagccagccatgagtgtggtcataccatgagtcatgagtcactgtgagaaagatgaggaaaagaggtgatgggtttgattgtctgcacagttgcagcccactgtatgcatgccataagtagttaaggagcacatgggtgaagtgaatggaaatccttttcccttttttctcatttgcaagagaaatagaattctgcccttactgcctagatacaaggcagcaggtgctgtgtgagatcgagtattgaagataagtttcacctctacctgtgaagtggattttcaattatgaagaaaattcagttagcaaatataggagctaaacttcattgttcttttttttttgaagtcaatgactttgttgtttctatcatgaatttagttgctttctcttatgccagaaaatgatgtaattaatggctgctaacacatgttttttgcttatcttctacccaccaagaaggtttttcctcacatttgcactgtattcagatgactgtggctggaggggtcatgtctcaagggatcctgttacttggatattgttgacatatagtgtggggcatctgacacatgcacaccagcatctccccttgatatttttagtcttcatatcaagagtaaacttgctgtttctctctgtaaatctggacagtaaaatagaagaactaatattcaggaatggtcagcttgctttcgggtcatacgtaatagaaacctatgctgaaacataaaaagtgaaacattcaagcagaaaagtgcagagattgagggaattctgtttgattccactgctccagctcattctaaggaggtcgagttgaattcttatgtaggattcattgaaaaagcatagtgttttcataattgcccttttgctcaaattatttacatttaatatttcttgcaactaaaggtttggcataattcagtaaaagctatggctgtggacatgatggtgctgaagtgcaaataatgaagtgatctgctcaattccatgtagatcatataccccaagaacttcaaataccaaagtggatgcttttaaaaatcttacaataaagatgccaagtatttttacatttttttttaatttttattttttgagacagaaccgtgctctgtcatccaggctggagtgcagtggcatgatcttggctcattgcaacctcactgcctctcaggttcaagctcttctcctgcctcagcctcccaagtagctgggattacatgtgcccaccaccatgcacggctaatttttttgtatttttagtaaagacggggtttcaccatgttagccaggctggtctttaactcctgacctcaagtgatccgcctgccttagcctcccaaattgctaggattacaggtgtgagccactgcacccagccagagatgctaagtatttttgtaacatggagcagctctgaacactttggtcaataagaaaattgaggctcgtagaagttaaaccattcttctgctgaaaatagctagtaaaaggttgaataatcgctgtttgaatgccgacattgggacctctgagaggagagcatttatgcaggaacatgctagatcatggactttgggagcatgttatgctgctatagcaaaaattgtactagttaaaaatatggttactccatgaattacaaggtaatctcacaagatgccagataattgcacaagctggcagaaagaaaaatgatgttttaaattttttatttttggcatgatagcctttaaaaataacttttatggaagtccaccctttaaaaacaatattttaaaaaattgaaatacaggttaaatttgaagctctttaatatagtgattaaagctgcacatgatgttgaccatgcagatattagtaccttaatgccttcaccacacctaactcccatcctggttctaagctgtaccagcttttctcacctcatgcagtttcctgagtttgtccttcagcttggttccttggtagcctagtctacaggtttttctttatatcttattttttttaagttaacaatggatcctggaggccactgtgcggtgatgtggcagtattccctattcctgttttaagttgggtactattccagaatattgtcagtggcaattttggttctttcttgtttgctatttcaagtaaagaacatttgaatagttttgtaaatccatctttttttgtgtttttgcttttgtacttcttctgtttgataagggggaattctgcatgaacatgtaactgcaggaacgtgagaatttgcaaacttttcctacatagatttatgtcattttccatctaaccaccaatatatgagcatgcctgtctatgagagtctcaccactagggtgattggaatgatctgaatgctagctgtggtaggcagcaggtcccccagtacacacacaccaaagatgtccatatcctaatcctcaaatctgtgaatgtgttacttttcatagcgcaagtgactttgaaggtgtgattaaagaatcttcagatggggagattatcttggcctatccagctggagacagtgtaatcacaagggtcattttaagaggcaggcataagtggcaaaagcagagaaagagatgtgatgacaagaaggatgtggccatgtgacgaagtgagggcagcctctagaagctagaaaaggcaagaggtagatcctctcctggagcctcaggaatggcaggtagctaggcccacagattaattttagctcataagacatattttggaattctgaactgcagaacatggcagtttaaacaaaactgcttagttttaactgctgtatttgtggtaattcatcacagcagagagaaactaatgaacctcctagtgtgataggtgagaaatggtatctcggtgtggtttgaattacacttctcttattttgagtatggtaagttgtatttttaaatggtcacagcacttagaataatttggagggacaaagcatgttcactgagattctgttgctaactggaggtaccagagatttaaccaacacctaggtttggagggcaaaatttgtttaaaccatgagacagtaagacctggacgtagaaactccaccattcttctaggaacccctattttgagtcatagtcaccatgtccttgaagaaaccattcaaaatattcttcagatgactctggatttttgaccatccttattgctctccagaaatagtaactagaaataacagcatctctgggatttctcactatgtaaataatcgtaaatgaaaaaggggatattgagaataaatatatccatttcctttgctccaggatttttgcaagtggataaaaaaatttaactcacattagagtctttggctgtagctcagccttctttaaatcattcatttaacaaaatgtattgagaacctactatgtgctagacatacagctataatggatcaatgaaagaagtctgcgtccgagtcctctgtacatttatggctaagggctgggctgtacaggcatggggcaagatcaccagaattttaccaaatagtagtgacttctaacagcttcttaacactcctgttatctagctgagtcattgaaagcagccagctacaaacagacacattccaggcagtggagaaagaggagaaaaatgccccctaacttctcatcagaaaaacaaaggcctaatgaaaatggaaagttgtctttaaagtgctgaagggggaaaaaaaaccttcatgctaaatatgcttcacgtatgaggatgaactcaaggtaatcttagaaacatgaaagctgtgagaatttattgctgtcagctctacacgacaacgaattctaaagtccttcagtctgtgaggaatcatagtgtatgtcaagggggaaggaaggaagaagccaagaaacagtaaaggagtaaatttaaaagacattttctttcctcttccaattaacttaaaagacagctgagtgtttaaagcaaaataaccccgtagacagtttttgcaatgtagataagagtgaaaattgtgagggaaatagtacaaagaaagatggtgggtaaatggaatcagttaataactccagattttctcctcgttcagcttgacaaagtcaccaaatcctccatctgcataactccatcagtaaacactgcatttaatctcctgggacaaccaatactttttctgtatttttctccctgcctcaccctctttacctatctatgatatttcttaaaatagatgttttcaccaactgcaccctgggatctgatactaagctaggctgtcagtaaatgatattgtcaccacagaaaccaagtatatgtctactctttgtcgtgcccaaatacaaatctgtaaattcccttaatatgtgggttggggtcatcttaatcatcacctttttctcaatcctgtttcagagcctgacacatgataggtgcataatacttaaatgtatgaaggaataaaaggcatgaatgcatacataagttaattaataatcagaagtgagtacatggaagaatcagtactgccagtttaaacacacagaaactgtgcttcaaagacgctgcactatttgccagtagacaaaatgtggaaccaaggttcaaactggaattttctgagataaagtcacaatcatattacagagcttggtcttgggctgtttgcttgggctatttgttttctttttcatttattcatcctatattttcttaaatctctacaacgttttaagcactttgccaaattagtataaaacagtaaaaatagtaagataataaacatggtcttcataatcatggatgtcacggtaaaatgaatcagcctgacagtaagtaagccagcaaatgaaacatagcacagtagtaatacaatgtgatagcataatactgtaataccttttttttttttttccttttcttgagatggagtctctatctgttgcctaggctggagtgcagtgccgtgatctcggctcactgcaacctctgcctcccaggttcaagcgattctcctgcctcaacctcccgggtagctgggattacaggcatgtgccaccatgccctgctaatttttgtatttttcatagagatggggtttcatcatgttggccaggctggtctcaaactcctgacctcaggtgatctgcccaccttggcctcccaaagtactgggattacaggtgtgagccatcacacctggcctataatatcttgataatactgctactaccacatcacctaagatgcttcaagggagtttcatacagttttgatggttttaatgccatatgatttaaactataatctatgatgagtacacattcacattttatagcacagggtcactcaatgctagaggttttatgtagagctcctgaaatgatgcatctgagtcctttcagctgggaaagacatggtctgaataggtaatatcatggttagaaaaacccaattgggtttcacatgtgagtaccaaacctatatttcctctcaaatagaggtactggcttataattgaggtgcttcccacatgggcttgtcaacattgggtgcctctgtgttgagggtgcagccaggatttataaaactgaagactgaatattctctggggcaataccaggcagattctcttgtatatgacattgtagcttagaacaagattttctaatctgcttactttactgaatcacattttaagtttgtttctaaaacaaagatattgagggcagtcagaaaagtagtccacatggacattcttttttttttttttttgagacggagtctcactctgttatgcaggctggagtgcagtggcgcaatctcggctcactgcaacctccgccttctgggttcaagcgattctcctgcctcagcccaccaagtagctgtgccaccacacccggctaatttttttgtatttttagtagaaatggggttttaccatgctagccaggatggtctcgatctcctgacctcgtgatctgcacacctcggcctcccaaagtgctgggattacaggcgtgagcaccatgcctggtggacattccattattaactcaccttggccttggaattaatgacttggagaagacctgaatggggaggggagagcagtagaagcatgagcctttctgactgtctacatgttcttgcccagttttaacttctagtcatggcgaatgatcgcaggagagcacagactggaccctgctacgatctctcttggagtggatcagactgatgatcaccaacaaccaactcattcccggataaggaagaagagagtgtcacctacttcagtgtggtttcaaccctacttctgcatcttaaagacactgtatggtttcagcagtagtgcccctgttcattagtccccctgatgttttcattcctcatctcatctttttcttagcagcattcaatgaatccttcattctagaaacactctatatctttggttttcatgagaccattctcaccttgttttgtcctgtgacttttttgaaaaaaacaaaaacaaaaaaccctttttttctttttaaattctggtaaaaaacacaatgaaaatttgctatcttaaccatgttgaaatgtgcagttagtaaagtacattcacattgtggtgcaagccatcactaccatccatcactagaacccttttcatcttgcagatctgaaactctacccattaaacgacttcccatcttcccatccccacagctcctagcaaccaacattctactttctctatcagtttgactactctaggtacctcatatgagtagaatcatacagcatttatccttctctgcctggcttatttcacttgtataatgtcctcaaggttcattcatgttgtagcatgcatcagaacttcctccccttttaaaggctggataatatttcatggtatgtttagatcacattctgtttatccattcatccatcagtgaacacttgtgctccttccaactttgggctgttgggtgtcctgccactgttgctcctagtgctcaatctcgtttattccctcctaatcaagtgtacaacgttggacactgtgcaggatgatgccacttcatcttggatgctaatctgccatgttgacttctgattaaccccaggcccaggaatgcctcaagatttctactttacttactgttgcttgtgtaagccaagacaaccttgatgttatcataaacatgtacttacctaagtcctgtcctttggcaaattatgggctatgagacacagcattcttgcctttccctgaggggtcaatttcagcgatcctacacattccttctgaagcacttatgctctttctatatggtatgtaagctctcggtctggggagtaacagtgcagagatctacctgtcttgttgccacatgtttctaaactttccaataaatcaccttctactgacaaactggatttgtcttccttattctttggtttcttggttcctttttggtatggatttgctttccctatgtggttctttcatgaaactgttggtgagctagccaggaggaattcaggagccaaagtatgggcaagggaaggaagcctcagttggggaagtcttggggcagccctctgtgtgtgtggggtgatattgcccgtttgctggatgcctgcagaccaccgcctgagtacggggatggcccagaacactacagggtctagagtgcttgtgagaagaaaaccacaccatgcactgaaggtccctgaaggtggcaacagaggggtggccgctattatgggttgcacatgtgaccccagaagtacagttagcaaccgagacaaaggtacagaagctagagaagtaattacagttagagaaggatatgaggatctccacatctgtgttagcatctaatttggtgcataagcttgaaactcaggaggtgcaggtggaaactgttgtctgccgcttttatgcagctgcgaggacaaaaactgcactggttgcaagtgtgagctgtccttgctagaccagaccaagatgctgagacctggaatccttgggaatcgacttgtgagtcagatgaagacagaggttatctcagagtaggaggattgtcctccccttttgagggcaggaggaaaacaaaacccaacagatacagctgtacaatagcaagcagtcttttcacagcaaagcttaactctgagagtacacctcagcagaactattggacacagcaagaactcttaaagcagctgccaagagacagcatagccacatggatggtggtgtggctatgcgagaggcccagtgaaggggacttcccaggtcagacactggcatggtggtctctggaggaggcacagagcaattcaggggagctgggtatgcagcaggccatctatgaccagcagttgcagttgtccccttgtaggacaagatgtatattatgtgcgggatgccgtagctggtcttggagaaactgaaaggggaagggataaggtccaactggttaccaagggaaaagaaaaggagatagcaagtctgttggacttgaaaaaggaggtctaaaagacccagttaggattaccagaaaacaaatgtggtacaatctgatctcagctgggataaaccaagaaacggaatcagcaacctcatgccatgttggtgggcatttgaaaggacttaactcccgcccaactgtttagaccttttcccagcatccggccagaaaaggaggatggaggagatgaaactatgtattaaaaaagaactccggtctctgctccagccttggactcctatccagcctacagactgcggggcggggggcgggggtgggagggggcggaaggggggcaaggttgcctctagggatgagcagtagagggtgactagaggctccatgtggagctcacaatatcagagttgaaaaacacatgcagaggacactagttgtagtggacacaggtgcagagtgcaccttagttcttggaagcccagagagacacgctggtaagtggacagctctagatggttactggggacaaacaatccaagtggaacaaactcctccccttcttggtattggatggtggagtttccctgcttactatactgtctttatctcacctattccagaaaacatgttggatatggacatcctttaaggatgcactttgcaaacgtccatgggggaattccaccaatgagtttgggtggtaaacactatttaaagagtggcagtgaaataggcacctgtactttttcctcccccatgatgtatcatcagtgtgaagtaacaaattattttcttggcagaataaaagaaatgacagccaccatagaggaactagccaaagttaatattagtcggccagcccagagtcccttcaggagttctgtgtgactgggaaaggaaatctgacagcaccgggcacgtgacagtagactacagggaattcaataaggtatttgctgacatataccctgttgtgcctaatatcatctaagtgatagaacaactatacaaactataggtacttatcatctgtattagatttagccaatgccttttttttttttcttgagaaaaggtcttgctctgtcactcaggctggagtgcagtagcaccatcatagctcactgcagccttgacctcctgggctcaagcgatccttcagctgcagcctcctgagtagctgggactactcaggaggtgtgccatcaaggtgcgccaccaagcccagctaacttttcttattttctgcagagatgagaaaataaagagaccaggctgatcttaaactcttgacctcaagtgatcctcccacctcagcctcctaaagtgctgagattacaggcacatactagatttgtctacctcattctttggtttcttgactcctgtgttggggaatgctttgcatatacagccctttcacaaaagagaccccacaaaacaattgatctcattctgtacatccagctaaaatcacatgtgtactagctgataaggcagaacaaaagtaattaagaggttttatttacttaaatatatagtgagtcaaagaaatgtggatgagcattgatttgaaggctatttatagatcatgaaggtaagcctggtgttcacccatgttgagggtgtatcttccccactcagtccactgatttataagccaatctcctctggtaataccctgaagacacagccagaagtaatgtttaccagttacatacatattccttaatccattcaagttaatacctgaaattaaccatcacatcaacccatgttctatggtacaaagcactgtggatgcattatctgtttacacaaggaaactataggctcaaacaggcttaatcagtttctaaactgaccctttaatttagtgggatatgttgaatcaaggacatagtgatgcatgctacaatctagatgcgccttgaagacattatgctaagtaaaaaaaaaaaaaaatcagacacaaaacaccacatattgtgatctcatttgtatgaaatgtcccgagtaggcaaatagataaacagaggaattagattggtggttgccaaggactggcgagagaagagaataaaaagtaatggctagtgggtaggatttctttagtcgttaaagtattctcaactattgtggtggctgttgcataactctgattataacaaggccactgaattttatactgtgaaaaataggctaggcgcggtggctcacgcctgtaatcccagcactttgcgaggccgagatgagcagaccacgaagtcaggagattgaggccaccatggctaacacagtgaaactctgtctctactaaaaatacaaaaaaattagctgggcgtggtggcacactcctgtagtcccagctacttaggaggctgaggcaggagaatggcttgaacccgggaggcagaggttgcagtgagccaagatcgtgccactgcactccagcctgggcgacagagcgcgactacatctcaaaaaataataataataataaagtaaaataaaataaataaaaaatagccgggcacagtggctcacacctgtaatcccagcactttgggaggccgaggcaggtggatcacgagatcaagagatagaccgtcctggccaacatggtgaaaccccatctctactaaaaatacaaaaattagccaggtgtggtggcaggtgcctgtagtcccagctactagggaggctgaggcaggagaattgcttaaactggggaggcggaggtttcagggagctgagattgtgccactgcactccagcctgggcgacagagggagactctgtctcaaaaaaaaaaaaaaaaaaaaaaaaaaaagaactagacttttatgctatgctatgaggactaagctctgatatttttatgttgcccaaattcctacctaaggggtctaaggagtcatgccctacaaactataaattctcatcagatgggttttgtctggccctacgcatcacgagttacttttcagtataactctggcataacattatgagaccaggaaaaaaatatttaaccccaaaatatatttccttgccataccttgaaactgccctgctaagtctcttttgggaaaaatccacatcctatagagaatctcctttcccccttgttttccttcatttctttccagatccaggagataatcaactaagagccaggtacccttttgggcttgataagaaacattttacaacctgctctctctctcaagtctgctgagaacttcctctgcacaataaaatttggcctccacaatcctttatgttatcctgaacattcctttctattgatcccaggtgttcagataaactcaaccaattgtcaaccagaaaatgtttaaatttacctatagcctggaagccaccactctgaattgtcctgcctttctgaacctaaacaatgtatttcctaaatgtatttgattgatgtctcatgcatccctaaaaatctatgaaaccaagctgtacctcaaccaccttgggcacatgttctcaagacttcctgagggcggtgtcacgggccatggtcactcatatttggctcagaataaatctcttaaaatattttacagagtttgactcttcgtcaacaataatctggcgcccaaacgtggggcctcagagaagactcaggacccctaaggagttgcctgaaaccggagctaaggtaccagcaggggcccattgaagtcccactgagttcaagcttctcctccggtggaactggtaagtcctcctgagccccagacctctccttgaccagacttttcttaggcttccctgagccctcttcttgagtaggcctggaccttggatttctgtgtccatccttgctgcacccagttttagcaagaatcctgttaagtaggtttagtgagaattcccttatccttgatcaggttcctcatcttccacccttaatgtctaagtccttggcctgcctttagcaggattctacccttaatacctaatcaagttcctgtttgtgatttcccacccattgacccccttactcttatagttggctacaaaaccaactgttgttgctatattggggagttgagttcactgtctctcccccattgcaattgtcttgaacagtattacttaccgtttacacacgtgtattcttttcctgtttccctcatttgcatgagaaatggaattctgcctttacagccttgatacagagcagtgggtgttgtgtgagatacagtattgaagatgagtctcacctctgtctgtgatgaaatagattgtgaattgtgaagagaatgcaggtagcaatgtaggagctaaacttaagtgtcctctaatttagagtcaatgactttgtcgtttctgctgtgaatctggctactctctgctatgccagaaaatgatgtacttaactgcagcaaacacgtatctttagtttatcctccactcacacaaacctttgggacagcacatgttatcaggagttttccccctcacatctgtactctcttcagatgaatgtggctggagggtcatgtcccgaggaatcttattacttagatattattgatttttgcagagtggggcatctgacgtatgcacaccagtgcctcttctcttgacatttttgctctttgtatcaacagtgaacttgtttctctctgtatatctggacaataaaattgaattcctcatactcagaaatggtcaggtcacattcaggtcatgtgggcacaaaataatagaaacttacactgagacctagaaaatgaaacattcaagcagaaaactgcagagatttagggacttctgtttgattccacaattgcagctattcctgaaaaaggtggagctcaattcctacattggattcattgaaaaagcacagtgttttctgtttcccttttgcttgaattccttgtcatgtctaatgttgtctgcaactcagggtttggaataatccaataggagctctgattgtggacatgatctaacgttctaataaccaagtgatgtgttcaacctgatatagataataaactccaagaccttcaaaaaccaaaaggaagacttttttttcatcttacactgaagataccacattatttttatgcatggaaggggtctcagcactatttcaatgaatacagtcccaatccccatttgaaaaataagaaaactgaggctcatagaagttatgtcatctttctgccgaaaaacagctattaaaaagttggatagtcactgtttgaatgcagacacttggagctctgaaaggagagcatttatgcaggaacatgcaagatcatggaccttggggccatgccatgctgctataccaaaattgaagtagttaaaaatatggatactccatgggttcataggggaacctcgcaagatgctggagacttggataagctgacaaaactagaacacgttttaaatttgggggcgggagcattacagcctttaaaatatcttttataaaaattccactcccaaaatctgagagtacttgtcagaaacagtatttttttaaactcggaatacaggttaaaatccaagctccttaattctgtatttaaggctgtccatgatatcgaccatgcagacgttagtagcttcatgtcttgaccacacctgactcccaaccctgactccaagctgtgccagctctgctctccctgtgcagtcttctgggttgtcctctgtcttggttcattggtagaatagtcacaaactttgttccataccttaatctttttaagttaacaggggatcctagaggccactctgcagtggtgtggcagtattccttattcttgttgtaagttgggtgctgttccaggatattgtcggtgggaattttggttcttttttgctattacaaataagaaacatttgaatagttttgtaaatctacctttttcgtggttttgcttgtatacttttttcactggagaagggggaattctgcatgaaaatgtaaattttaagtgttagaatgtgaggatttgcaaacttatcttacacagacttgtgtcattttccttctaaccgccaacatatgagcatacctgtctacccagggtctctccactagagtgatctgaataatttgaatgctagctgtgtggtaggaaggagcctccccaccgctctcaacaccaaagatgtccatgtcttaatctcaaaatctgttcatttgttacttttcatggcaaaaatgactttgccaatgtgattaaaggatcttcaaacagggagagcaccatggactattcaggtgaaggcactgtaatcacatgggtcattataggagggaggctgaagtgtaagaagcaaaggagacctgatgacaagagagatgcagccttgtgacaagaaatgagggcagcctgtagaacaggagtccccaacccctgggccgcagaccggtaccagtctgtgacctgttagaaactaggccacacagaaggagttgagcagcgagcaaacgtcaccgcctgagctctgcttcctgtgagatgagtggcagcatattctcaccggagcgtgaaccctattgtgaactgcgcatgtgagggatctaggttgaacgcttcttatgagaatctaactaatgcttgatgacctgaagtggaacagtttcaccttgaaaccattgccccatccatcttccagaaatcccatccctggtgccaaaatggttgaggaccactgctcttgaagccagcaaaggcaagaagtagattctctcctggagcctcaggaatggcaggcagctaggcccagacattaattttagctcataaagtatattttggaattctgaactacacaacataatttttttgttttgttttgctttaactgctatgtttatggtaatttgttacagcggagataaaaaaatgaatacacttctcagtatgataggtaagaaatggtatctcagtgtagtgtgaattacactcctcttattttgaatgtcataagttatcttttttaatgttcatagtacttagaataatttgtatggacaaagcacgttgactgagcttctgttgctaactggaggtatcggatatttaacaacacttagaagtttggatggcaacattcatttaaactgtgagacagtaatacctgttgaggtgcagaaactccactaccccttcaagaatcctttttttttttttgagacagagttttgctcttgctgcccaggctggagttcagtggcgtgatctcggctcaccacaacctccgcctcccagattcaagcgattctcccgcctcagcctcccatagctgggattacaggcatgagccaccacgcccggctaattttgtatttttagtagagacagggtttctccatgttggtcaggctggtctcgaactcccgacctcaggtgatcctcctgcctcagcctcccaaagtgctgggattacaggcgtgagccactgcacctggaagaatccattttttttttgagacagggtcttgctctgttgcctgggctggagtgcagtggtgtgactatggctcactgcagccttgaattcctgggctctagcaatcctcccacttcagccacctgagcagctgggactacaggcatgggccagcatgtccagctaatttttttgatttttagaagagacgaggtcttaccattttgcccaggccagtctcaaactcctgagctgaagcagtcctcccagctcgacctcccgaagtgctaggattacaggtgtgagccactgcacctggccaagaacccatatttagagtcagactcaccatatccttgaagaaaccattccaaatattatttaaatgactccgtatttttgaccatcctcattctccagaaataataaccaaaagtaactatatctctgggatttctcactaggtaaacaatcttaaatgaaaaagagagataataagaataaatgtatccattcttcttgcttcaagattcttgcaaaaggcaaaaaacatcaaactcccattaaagttttggctatagcttgtccttctttaattcattcatttaacaaaatgtattgataacccactatgtgcttgacatctacttagacactgtagaaggaacagaggacaagatacgggtcatttctgccctgaagaacattataatataaggcagggaagaggctaactaatgtttggacaatcaaatgatgttactacacttgggcaccactgtttaagaatccctgggctgtaaatcaggaactgtgagtttgttgggattctgccagagactctgactcagtgctactccaggaattttatctttcagacctctctttctttttgtaggaattcctactctatcccatataagcaaatctcagggactaagcaagtagatgttagcagtcaaccatatgtaagattcttttataaaattcaacatgatggcgtgaataaactcactatgctaccactggttgtgaaacctgaagagattaaacaaactttgcattttctcaaaacaaacaaaaaagagtttgttagaattaataaagctgaccccaagctaggataagttggatccagtgtcatacaaggccatttccaattctaaacaaataacgttgaccacatggagcctgtggggaaaactggtcaactctcacctgaagttccaaaagttgagaatatcatattctgtcccagaaattaatttgtaatccaaattcacctggtcaccaacactgttgttaaatttgatattcttcagaaaggagttaagcttaaaaatagtgcactgttacaggatggaaagagttctgaatttggaaagaagaaacttgaattagagtaatacctttgaaacttattagatgtgtggctttggaaaaagtcccttattgtttaaatcttcaactgtaaagttagttattcaattttatttttacaagaattatgtgagataatacctttgatggcccatgaacaaaaatgtggtatatataaagtaaaaattagataaagaaaacattatatatgtaatgtaatgataatttaatatatagtatgataatggaaataccccttacttccttggtgggatgaatgaggacagaagaatcaaaataatctcttgttattggttgaattttgtctgccccaaattttgcatgttgaagtcctaactcccagtacctcagaatgtgactgtatttggatataggatttttacagagttaattaagttgaaatgaggtcgttagggtgggtcctaatgcaatctgactagtctcaccatgtctccatgggttttctctgggtactccagattcctcccacatcccaaagatgtgcacagtaagttaactggtatgtctaagttgtcccagtctgagtgagtgtgggtgtgtagtaggctacacaatctaggtttgtgtaagtacactctatgatgtttgcacaacaaggttcttaggaaattgcctaagaacccatttctcagaatgtatctccatcctttagcgatgtagactgtatttccatactgtaaatagtccccttgtggtggatttcaatctaccaatatgacatcactgaatgtggagttagaaagaaaggtacagttcatggctctcagttcctacagctcttttaatttcctaaatgactgcagcaataaagtatcttttgttaaaatatctggccttttgttcctggttcctgaaaaagctccagaacagctccagagccataaaggtgaaagacagtatttcaaccacacatgagtttatgttaatgaggtgatttttggaaactctcaagataatcccaatatttggggggagtggtggctagttgccagaggaaccagccatgtgctcagaggactggaactcacagctccaccctctacttctgggaaaagagagagcctgaaaattaagttgatcgccagtggccaatgatttaatcaatcacatctacataatgaaaccttgaaaaccgaaaaggcctgagttcaagcggcttccaagaaggtagacaaaaacacatcctcgtgctgggagggtggtgcaccccaactccacgggcacagaagttcctgcactagggattctctcggaccttgccctacatgtctcttcatctggctatttgtatcctttaaaatatcttttataataaaccagtaaacataagtgtttccttgagttctgtgagctgctctagcaaactaatggaacccaaggagccggctgtgggagccccaatttatagcacatctctctgaaacacaggtacaacaatctggagtttggaattggcatgggaagtgggggacagtcttttgggactgagctgtctaacctgtaggatctgatgttttccaggtagcgtcagaattgaattggagtagcggtcacctggctggtgtctgctgcagacaggtttttttgacatgttaagacattataagagacaatagaaaaaatgtatacgatacaaccttctctgagttatatttctccatagccctttttactgttcatcagactgtttatctaactcatgaatttgtggcttgtctctctccgcttcaaagtaaattacataataagaggacagggatttttttttctctgctgtatccccctgaattgcttttccttatttgtctcaccttccaatactaattctacagttctcctagtcagggctagtcccctaaaacggggaccatttccattttgttaaggggctgaacgcggttcaagcctagcagattggttccaaaaacgtcgtgttattcactgcctctgatcagtgacattcccatttgcagctgaaagaggtattaattcgccagagtcacaacacggtcggggttcctcgtcgctgtcttattccaaaataagcttaacacagaaagataatgacactcccacggactggcacagaaggccgcgctccgaatgacatcgcgatcacagaggcacagacagcgtcacaaagccccacgcgtactcacaccgaaggctcagccgtcgcgcgtttccctcccaggccccaggaactagtaactagggacgcttctggtctctaggcgaggagagggggagagcgcaatctttgcgcctgcgcacactcctgctcttacccgccggaaccctgggccacgcccggctcgcgtaatcacgcactgcgcaggcaccgcccgctctgctctaaggtccctctcactccttcagcagcccgaggacaatcccctcaacactaggccacgccttgtctccgcccctctcgtccgacccctggagagaggctggcgcctgcgcgatggggggttccagcgtcgactcacggagtccttcggatgagagcgtctgggtgccagacgaggccgggggtttgttttgggtggtttgggagtccgagctcgagggctgggccaggaagggcaggcgaggcgggcggctccgacgcgggtcgcgaaggcccagccgcgtcctctgtccccaggacgactacatttcccagaggccagcggggcgcgcgtactcgagtctgcggggcggaggccgcggctcggggctgctgggcgttcggggcggcttggggcggcgggaccactggagtgagctgtgggagagatgggggtgtgcctgtgtgtaaaagatctgtcagagtgtgaggctccgtgagagggtgtggtttctgtgtgtgtgtgtgtgtgtgtgtgacagaccgagagtccagtgtgagaccagggtatgttcgtgtgtgacagagcgagacgggccagtgtgagagaccagtgagtgtgagagagatagggatgtgcctgcatttgaaagagagcgtgtgaagctcagtgagaggttgcgaggtgtgtgggtgtgtaagtgtgtaacagaccaggtgtccagagcgtgagaccaggatgtattcgtgtgagagagtgagacgggctggatggagtgtgagagaccagtgagtgtgagagatgggcgtgtgcctgtgtgtgaaaggccggtcggtcggtgggtgaggctcaatgagaggccggtgtgtgttcgagagagagaagaatcaccatgtatgcgagactagactgtgcaagaacagagtgtgagactgtggtatgttaatgtgtgaaagggagaccagtgagtgtgagaaatgggtgttttgggtgaaagacccgtcagtgtgtgaggccgtgttatgtgtgtctgacagactgagagagaccagagtgtgagaccagggtgtgttcgtgtgtgagagacaacatagcgtgagaccagtgagtgtgagagagatgagcacgtggctgtgtgtgaaagaccagtcattatgtgaggctccttgagaggctggtgtgtgtgtatgagagagagaaagagactaaactgtgagagtccaaagagtgagactaggttatgttgttatgagtttgtgagagagagggaggcgatcaaagtataggacaaagttatgtttcctggcttacgacttctaagatccttggaatctccaaagtattaagtgtctttttgcatgctaatgattggtgggctggcagcctgtaggttgatcacggtaagggatggtcacaagaacaatctaggcaggattagagggttgggattacctgccccatccctcaatctccagggaaaggaaagggagccacaggttaaactgatcatcagtggtcagtgatttaaccagtcatgcctacattatgaagcttccataaaaacccaaaaggactgggttcatcaaacttccagatagctgaacactggaggttcctgtaggatgagccccttcctatataaccttgtcctatgcatttcttcacctgcatcctttgtaatatcctttattactacaaacgtgtttccctaagttctgtgagctgccctagcaaattaattgaacgcaaggagggggtcataggaaccccgatttatagctagtcagaagcacaagtaaaacaacctggggtttgcaactggcattggaagtggggagcaattttgtagggctgagccctcaacctgtgggatcttatgctgtctccaggtagatagtgtcagaattgggttgccctagaggtcacccacctggtattcactgggttgccctagaggtcacccacctggtattcactgaagaacttattgcttgcctggtgtgtgtgtgtgtgtgtgtgtgtgtgtgtgtgtgtgtgtagatccccacacatctggtcttagaactgttttgtgttgtgtgagtggagtaggagaaacagtttgtttttcctctttgtcacctgagtgtgttatcagggactggattgtgagaatccagagtgtgagaccagggtatatcaatgtgtgagagaaatagatgtgcctgtgtgaaagatgaacaagtatgaggctccctggagtctgagaaagatcatgtgtgtgtctgagtaaaagcaagagactagactgagagttcagtgattgggagagactggggtatgttggtgtgagtgtgtgagagaccaatgggtatgtgagagactagagtatgtctctgtctggactggtaggttgtgagagggtgtatcacagtatgaaaaagattggagtgagagtgaccagtatgtattttgtgtgcatgagataaagcagttggaatatgagagatcagagtgtgtttgtgtatctgtgtgagacactggagcatttgagtaactgaggcctctttgaaagataccattgaatgtgtatgtatgagagaccatcatgtttatatgtgtgaaagagggagagaaagactagtgatgtggttgtgtgagagaccaaaatgggtgagaaagaaactatgtgaaccatggtgtgttatccaaaaggctttacaaatataacctctgtgaggttgtgaagcatgcatgtgtgagtgagacagagataagggacagtgagctgtgtgtgtgagagaagtaagattgggggtatgtgtgaaggtgttggtgaatcaccacgtgtgcttatattcatgtcctcaggcaatggaaatgtgactgtgtatatgtgcttgttttggggtgcttgtgattgtgtcctccgtgtgaccatgaaacctgtgttagtgtttgtatgtcaccctgtatacccataattgtggccctgtatgactgctgtgtatggagagactacttggaagattgataggattggattctttatgagtgtggctgtttggaattgtgtgttgccgggataggaaatgtggaatagaattcctgtccccagtccaagggtttcagtaagaagcaaagctggggtgactgaagctcctaactgaagcaggagacaccctcacttctgtgtgacaggagggtaattaaggggctgggacagaggtgagagtgaaagtggcagaattgagtgctaaaggttccatcgtttcagggtgaggaaagtgaaacagtgccggggggtgggtcagggatgcagtggtggggattgagtgaagaaggaggataaccctggcctctggtggcatttgggagtcagattttcctttttcttttgtttttttttttttcccaaaaaccccatccatctggcccagaaaggagccagattttcaaacagtagactttcaaagcatgaagcagagacccaagaagagaatgactccacctttacctgtaaaatggaggaaatgactattttataggattatttgaaaaataaagtgagataatctaatctatgcagagtacctaatgcatctgaatgggaaggtagctctttgaaaaagattaaatttaggacctcaagcatgaaaaaaaaaaaccgttatgagttttagcccttcagtggccataggttgctcatacccagttatgggatcaaccaaagctgggaagaagaagacagttttaggctagtgattctgggagtgcagcatctctggcctcatctctctctaacctttcccttccttcagccttgccctcccaagacactgttcttcaagagaaagaccagaagagaaggcaaaaatgaatgttgaagtagtaaaagtcatgccccaggttagtggatattttctttctcttcatgaaaggcagtcttgctgtttaggactttttgtaatgcttcttttcttttgaaaattccctgattaacagtccaggagcctagttcccacttctctcaggggccactgtctttaactctaattacctaatgagtgagtaatagcttagtataaaaagtcatggaggtccctctgagattcctcttcccaccttgtgtacattttaaatttagtgttgactcttgtgaaaagacttgatttatgttgtgtggaatatacatgtggatatgttagtactagtgagttgggctccaggttaaatgtgcatgcagtgcgtttcctatatatagaatgcattaggaattattcctctacctgaagttttctccaaatctctaattatgtccttaagataaattctttaaaagtttttctttacattttaagtatgaattaccaacctcattcgttcacctgaaaaatcttattctacttaatttttgcaaattttataaatttaaataggtgagaagttgacatggtacaaaatttacaaacaaatttcacccttaactcccagttattttaagaagttattctcaccatgtatctcattcagagctatgttatgcctttgcgtgtatacaaaaatactttcttcccttcaaagttaatgatttttcgtgtcttgttgatgaaatttttgtctacctttaggtcctatttttcttctaagatttgttttatccttcacagttaagtttctggtaagcttagacttgatttttgtggttttctatcatggtagggctgaaattacattaactttttatgttaaatttaatttacattagatttttacatttaatttacattacatttttacattacatgtataatttataataagtgaggcagagatttattttttcaagttggcacaatggcattaattgaattattcatctcattctcactaatttgaaatgccacctatatcatgcactaaattcctgtgtgtatttggttctgttgctgtactacactcagttttacttgaatttctgcttttaatcttttaatttttaaatattatattgcacatgtataagaaacaatgtataaaaaggaatccttaattctcccactgtgaaattcccctcctcacattttttctaagtggaaaatgtgttttcatgacatacatgagtgtcagatgtccataattaatgcttaattaatttatatgcttcatatggaaagttacgttaaattaattttgaaacactgcttttttttcttgtgctgtcagagttcatgagatattaaaaaacatttacatggattctgggcatctgtgtcttcctcagcattaaaaccattttgtgagttacctaacataattttccaaagatacagaccttttagtttgtgtgcctcatgttgtcattaaaattctacctgaagtcacaagcaccatacacaacagaattagtcccctccaatttgccctatagaagtaagttgggatctccacaatacaacttactgtctttagttttgatatttaacctcatactcctgaataatgttccatacactatttcttgattattttagttttagaaatgatccagtaacctactactatagatgataaagatgcagtccattaaccccaccacctgaaatgcacacacacatgcttatttgatagactgtaaacattattcactatttttgttttaagtcagtgttcagcgtagcttggtgtctttcatcaatttggaaatttttcaaccacaaatattctgaaactttcctctttttctaagatcacaattatatacataactgacactgttttatatgtcacttatgctttaattctctctttaattctctaatctcctgttaagcccataatggaattcttaacttctgttattgcatacttagttctagaatttctatttaattgttttatgtaattttctattttcttcctgaattcactacctttccttttagctccttaaaaatattatcataatattttggtatccttgttggataattccattatctggatctcttatgtgtttctattttgtgatgttttgaaaattatcttgttttttgtcttaaatgcctcattttgggtttagtgctagactttatatatttttaaaagatagtttgaagctttgatgtcctcctcttgagaaggtctacttaaaaaataaattttattttttagaatagttttagatttgtagaaaaattgcagagatagtgtagagaaatcttataccacaccaagcttcccctattaatattttacattagtgtggtacttttgttaaaattaatgaaccaatattgatatgttattagtaactaaagtccgtgcttagtttagattttctttcattgttttaactttttaattttttttttttttttttttttgagacagagtttcactctgtcacccaggctggagtgcagtggcaggatcatagcacactataacctgcctctccagttcaagcaattctcgtgcctcggccactcgagtagctgggattataggcatgcaccaccatgcacagccaatttttgtatttttggtagaggtggggttttgccatgttgtccttgccatgctatgtaggctggtcttgagctcctggcctcaagtgatctaccggccttggcctcccaaagtgctgggattataagtgtaagccactgcacccggccaggctttcttaggttttatctaatgttttttttctgtgccaggattctatctaggaaattacattacatttaatagtcatatttcctaagactcctcttagctgtgatagtttttcatactttgcttatcgatgaccttgtcagctttgaggaatactcagttattttgtagaatgtctcaaatctgatgctttttcatgattagactagggtactgtgttttggggaggaagactgcagaggtaaagttcctttttcatcacatcaaatcaggggtgcacactgtaaacatgatttattactgttgatgttaatagatgttaacttaattaactttgaggtagtgtttgtcaggtttctctataataaggttactcttttttccctcacttttccatactgtactgtttgtaaggaagtcactatgcacaacctacactccagaagtgggaaattatgttctacctccttaagggcaaacataaatcatttgaaagatcttctaaatgagatatttgcctattttcctcatttatttatttagtcttaatttagtcacttactcagtattaatcctcctggaaatttcataaattatctgataccttgcaataaatggttgtgtccttaaaaagaaaaaagaattacaagctcttcagatgctatccattgggatttacttcattggttatagcattatcagttaaaaaaaatcactacatatacatgcatacatatatgtaaagttattctatagatattggtaaaattctggtagtatatatactagattactaaccataagtaccaggatcaaaagcagttttttctgtgggaacagccaaagctcctctgtccttaatagtcagcaaaattatcctaaatattggaaagaatgtgaacaccttttgcttgcattgaggaatacatctcattttataagaatatgtgaaatgatggttcttagttctcaactcactagaaggtgaaaactagaattcagtaaaactgtgagtacacagagaaatgtaaacaattttgtaattcttttatatgaaaaatatattaaacattttcctaaaggtatgtatatcttctaaagtcccgtacattgaatatctgtttaaaatgtgcttttaaacactaatcttcagaacaaagacatgatacagagattactgtttaaagcgaattaaaatgtgctcataaccttgtctttagttatatttttgataactttgcaaatcaggcactaagattaagaagatattcattttcaacggaagtaaatctgaaggtgaaaaatgcccacaataacttttaaaatttcttacaagctgctggtgattataactggtcattaatttttctctaagaatatttaaaagttataacttcaatttcattttgttctgcaactgtgggttctaccaaccgtgggtggaaaacacagtattcactgatgcagacctaagaaaattgcattcttaaacatgtttttattatttaagaaaaaaaaatcagctacattagttcaatgcctttctccagcccctgccaataaaacttggatcccatggagtatcatttgaaaaatatcagtttagatattccttttatgcttttgaagattcaacacaggtgtgtgttctcccttgaagccgtcttcactgccttgtagttatgcacccatatttccctatgttcggaatcgattggccccattgtacccaatgcagttaaacacttccataagtactgttttggcttggatcttcctatttatgttttttctcttctatgagttatttctcacctaaagtagagacactttggatcaactcagagttatctttggacacgagcattggttggttaagaatatatttgtcacttcaggacttagtgacattcaaggatgtggcaatagatttttcccaggaagaatggcaatggatgaaccctgctcagaagcgtttatacaggagtatgatgttggagaactatcagagcctggtatcacttggtgaggatcttttccctcctgcataatctacctttaaggaacttttttgtctatatattattaaatttgcttttattatatgtaggtcagaatggaatttgggaatggaatctgagaaacagaggatattgagggactgaagaaaacttgagatttagagttagtgaatttggagaatatcaaatattccatgcatacacccttaaggcaattgggaacacaagacacaatgtgaatctcaccagtctcctcagtttccttgttctctctctcctacagaattactatcaccactagacaacaacaaggttcacaaagaatatatagctagattactataaattcagaatatcacttttaaaatctgtatctttgtattaagtaacaaactgaagacacaaactgaaaatggcttcagatcacttactgttagggaaattcctatggacctttcttctaagcactggggccaccccattggctagattagctttctgttctccagaagcccttttgattatgcttgtggttcattgagcttcttgaaactaaatttatatcttaaaccaaatttgggagatttttagccattatttcttcaaatctttttttctgttcttttctgttttggacttcagttacacctatgttagattgtttgatattgtgccctaggtaactaaggattgtttcacttttaaaaatctttgttctgttttaattttaatttttctctcgctctctttttttttttttttttgagacagtcttgctctgttgcccaggctggagggcagtggcgcaatcttggcccaccacctcccaggttcaagcaattctcctgccttagcctcccaagtagctggattacaggcacccaccaccacacccagctaattttttttttttttttttttttgaaacggagtctcgctctgtcgcccaggctggagtgcagtggcaccatctcggctcactgcaagctccgcctcctgggttcacgccattctcctgcctcagcctcctgagtagctgggactacaggtgcctgccaccacacctggctaatttttttgtatttttttagtagagatggggtttcaccatgttagccaggatggtcttgatctcctgacctcgtgatctgcccgcctcagcctcccaaagtgctgggattacaggtgtgagctactgtgcctgacctaatttttgtatttttaatagagacagggtttcactatgttgctcaggttggtcttgaactcctgacctcaggtgatctgcctacctcagcatcccaaagtgctgggattacaggcgtaagccactgtgcccagctcagattggataatttctgttgattcatagtcaaattccctgactctatccttaccctcaatgtttggttaggtgcatctagtgaatttttaagtttcagatgttatatttgttaaattatataatatttatttggttcttcttgtagtttcgtttctgagatatcctgtgtgtacatttatttcaagcatatttgcctttatattcttaagtattgatataataatagctgtttttaaatcatgtgctatttcttcttcgttattgcagtgtgagcgtctattgcttgctttttctaatgggcatgattcactttttccttttcttatgtcaagtaattttgaattttatcatgtatacttaaataaaacattgtagagcctctggattctgtcatattcccctaaagagtattgatttttttctaaagcaggcaattatctcaaaacttcaaactgtttctagggaccttttaaaatacctcatttactactgtgtgataatattcagaaaatgttgggctaaatttctgccctcaagcccctcataaaatagttcacagagttaactgttagcagtcttactaggctattccagagttttatgtagtctgtccttcagatgtgctttatctcttatctagtattcctactatatcattccaccagaattaaggtactggcttttagttctgaaataacccaaaacatgaccaattttcatgtcttttttttatatgtaggtctttgcatttctaagccatatgtgatctccttattggagcaagggagagagccttgggagatgacgagtgagatgacaagaagcccattctcaggtgagtgtggaagaaccagagaggggaatctttttgacataatggctcagccatttttagaggtgataccttctcacttatgcatctcagaaactcttcataagccttacaggcctggagagaaaactgaaactttatgcttcacatgggcccctcaaatatcttctcttccacttgactgtcttctctctaagaactaatattctgtagagattagagaatcttaaatctctaagatttttgttttgcaaaaatcattatccagctccttaccatcccgtctttcgctttgccatacagacttatataaacttctatgtttcttaaatcttttcttaactcttgaattaggtactgcttacaaattataatgtaccctgctgctctttcattcctttcctgtagcagataggaaaaatctaaaccctgttagcctcttcctgatcagctccttcctacttctataacctcattctttattactttttagctttttcattatactttagtccagagtttgctaaattatgtgagatacccagggtatgtttcaagtgagttacaggtataccaagctactgagtctctcaagagccttgggagactagatggctccagaggtaattccaaatctgattgcctctgagtcacaggcagtatcattcttttgcctgctccacctgtgttttacaaatgtcatattagggtcaacttttctgaactcaccaagctttttactgactcaggcatatgcacttcctgtttcctctacccagagtgttcctctcctggggtctgtctatcctgaatatcaaatcagagctaaaaaatcatctcatcagaggccttccctaaccaccttatgtgatgaacatttccccatcccaacccaataactgtccaccaagccactgtttattttctttctaacactcaggaaagcctacaattaacttgcttatgtttaatgcttatattctgcctctcccactgaaattaaagttccaaaagaaaagggcatatcaatatatgcccttacaattatggcttaaagcattctcctttcccttctgtaacagtgtttgatcttttggaataatttggatcctaaatttcccgtgtcctccaaatacaatagtccccctattcaaggttttgccttctgcagtttgttacccacagtccaccactgtccaaaaatattaaatggaaaattccagaagtaaacaatttatatgttttaaattgtgcaccattctgagttgtatgacgaagtcttgcacctttctgttctgtcctgcccagatcatgaatcatccctttgtctagcacatccatgctgtatgccctacctgccttttagtctcttagtctcgtctagcttttcagatctgttgtgtgtagtgaatatagggttcagtatcattccgggtttctggcgtccactgggtcttgaaatgtgtccactgtggataaggagggatgactatacccacacatcagaagggaaatagaccctgcttggatgtactttatactttggttttgtatgaagatgccatctgcctcaaatagagaaacagaaaagaactttcctgataattggccctgtgaagaacaagtggaagaagggaaaaggggaaaaggaagaagctataagtctggtgggatgctgagtcaatgtgtagatataagtattattgtatgcataagatatcttagtgtctgttaaaaaaggccaggaaatgaggaacaaccatggctctctgtaggaaattggagttgaagacaatcttcatgtgacaaaaaagtaaaatgtgagaaaacagtagatgatggactcagcattctgtgtctttttctagtattgttctcttcagtctgtctacgtaggaaaaattataggtgattagttcattaaccccacattgcctcaattcttgaagcatgggtgccctggtctgaatgtttgtgtgcccctgaaattcatgttgaaatcatcttctctagagtgctggtggtaggtggggaccttgggaggtgattaggtcatgagggctcatgagtgggattattacctttataaaaggcccaaaggagcttccttgccccttccactgtgtgaggaaacaggaagaaggcaccatctgtgagaaagccagcccatgccatgggccttgatcttggatttcccagtctgcagatctgtgagaaataaattagccatggccggctaattttttataagtgtattagtctgtttagttataagtgttgtttgtaagtgtattagtctgttctcaagctgctaataaagacatacctgagactgggtagtttataaaggaaagaggtttaattgacttttagtgccacatggctggggagccctgacagtcatggcagaaagcaaaggaggagcaaagtcacttcttacatggtggcagtcaggagagagcttgtgcagggggactcccatttacaaaaccatcagatctcgtgagacttattcactgccagtgaacagtatgggggaaactgcccccatgattgaattatctccacctggccccacccttgacatgtgggtattactacaattcaagatgagatttgtgtggggacacagccaaaccacatcaataagctacccactatgtggtacagtcatgggccacataaacaatgtatctatccattatggactgcatataagacagtcacacaagattatgatggaactgccctatacaggtataactttaaaaaaatctcttctggctaggcgtggtggctcatgcccataatcccagcactttgggaggccgaggcaggcagatcacgaggtcaggagattgagaccatcctggctaacatggtgaaaccccgtctctgttaaaaatacaaaaaaattagctgggcatggtggcatgtgcctgtagtcccagctactcgagaggctgaggcaggagaatggcatgaacccgggaggcagaacttgcagtgagccgagattgcgccactgcactccagcccgggcaacagagcaagactctgtctcaaaaaaaaaaaaaaaaaaaaactcttctattgctgggcatggtagctcacacctataatcgcagcactttgagaggctgaggtgggaggattggttcagcaggagttccagaccagcctgggcaacagcaagacctcatccctactaaaaataaaaaattagctgggcatggtggcatgcacttggtactcccagctactcaggaagctaaggcagaaggatcacttgagcccaggagtttgaggatgcagtgagccatgatcatgccattgtactccagcctgatgacagaggggaccctgtctcaaaaaatatatataaaatgtcctcatagcatattttactgtaccttctttatgtttgtatatgtttagatacaaaaataccattgtgcttcagttgcctatagtattcagtggtaacatgttgtgcaggcttgtagaccaggagcagtaggccatatagcctaagtgtgcagcaggctacaccatccatcaaggtttgtataagtacgctctgtaattgcccatccgtaatgatgcatttctcagagcatttctccatcattaagtgacacaagactattttgttatagcaacccaagttattcaagacactggatattcctgataccatgaagacctggactacaaagcatgttaatacctcaaaacctttcttgactgctctagtggatttgatctctcccatctctgaacttttataacaatttaatctttatctcacacttgattatgttttgtattatcttctcaaaactttttttgttggtcttgtcttcctaaattactttctaaacttttcaagaacaattccttcattactttgatatcacaaatgcttagtgcataatgtataattgcttaggaaatattggattagtcgatgatttgctatggatgacatagaaaaggaaagcccttcctttgccttttcttgaaaccaccttttccctcaggttttctctcagtatcatctcttcaatacaaatttctttatattttactgataactttgtatatatgcccagatttcttctatctatggtaagtgatgtagcaatatattttttctttttttctttttttttttttgagatggagtttcattcttgtcacccaggctggagtgcaatggcacagtcttggctcactgcaacctatgcctcctgggttcaagcaattttcctgctttagcctcccaggtagctgggattacaggcaggtgacaccatgccccgctaattttgtgtttttagtagagacagggttacaccacattggccaggctggtctctaacttctgacctcaggtgacatgcccgccttggcctcccaaagtgctgggattacaggcatgagccattgcacctggccgatgttgcaataatttttaaagcacatttattccttctgtaaacttatattctaggtcaggagttaagaaagttactcgtggtagtaaataagaatgtgattaatagtagttatatcaacctacatatcattataaaattcatttcttcaaaaggggaaatggtaaaaccctgttaagcagtggcttaaggtgctgggtgcagtggctcacacctgtaatcctagctactcaagagaaggtgggaagattgcttaagcccaggagttagtgagccatgatcatgccactgcactccagcccggacaactgagtgaaaccctcttttttttttttttttataaaaaggtggtctaagaggtgataattttaccaggctgttgaaagtaagatgaaagggaaaatctcttaatatgcagattaaagttcagggaactctgagaattggagagtttgctgtattgaaacatgtagatgatttcataggaacaccattttcacattatgaaaagataaccataggatttcacctaaatcctaagataatcacaagccatagggtatatggttactggagatctccagagacttttcagcagcagtagtgatacgatattggtatttaaacaaagttaacataactgtatatgaaaaccaattacaagtggaagagagtagatgaagagagcttaatttatagtctgttaggtcaatacaggcatgaaatattaccattgcagactacttctctaggatttcatcctacattgaggtttttgtttttgttttttgtttttgtttttgttttgagacagggtcttgctctgttgcctaagctggagtgcagtagggcaatcatggctcactgcagtctcaacctcctgggctcaagtgatcctctgacctcagcctcctgagtaactgggaatataggcatgtaccaccatgcttgactaatttttgtgttttttgcagagatggtgttttgccatgttgcccaggctggtcttgaactcctgggctcaagcaatccacctcagcctcctaaagtgctgggattataggcctaaaccactacacctagcccatttcgctttcttagtcacctctcccatgttccttcatgagctgtctttcttggggtctccctgaatgttttccagttgacatgcctgtacataacaggttttgtgagatttattaaatatttttaaattacctttttcacaatgtctcctttgttgtagcccatgataaagggaacattcacttttttttaatatctttcagattgggaatctatatatgtgacacaggaattacctctgaagcagttcatgtatgatgatgcatgcatggagggaattactagctatggacttgagtgttccacttttgaagaaaattggaaatgggaagacctttttgagaagcagatgggaagtcatgagatgtttagcaagaaagaaataatcactcataaagaaaccatcactaaggaaacagaattcaaatatactaaatttgggaaatgtatccatctggaaaacatagaagagagtatttataatcacacatcagataaaaaaagcttctccaaaaattctatggtaataaaacacaagaaagtctatgtaggaaagaagctttttaaatgtaatgaatgtgacaaaaccttcacccatagctcatcccttactgttcattttagaattcatactggtgaaaaaccatatgcatgtgaggaatgtggaaaagccttcaagcaaaggcaacaccttgctcaacatcacagaacacatactggagagaaactctttgaatgtaaagaatgtaggaaagccttcaaacaaagtgaacaccttattcagcatcaaagaattcatactggagaaaaaccatataaatgtaaggaatgcagaaaagccttcagacagcctgcacaccttgctcagcatcagagaattcatactggagagaaaccctatgaatgtaaagaatgtggcaaagccttcagtgatggctcgtcttttgctcgacatcagagatgtcacactggcaaaagaccctatgaatgtattgagtgtgggaaggcttttaggtataacacatcttttattcgtcactggaggagttatcatactggagagaagccttttaattgcattgattgtgggaaagccttcagtgttcacataggacttattctgcataggagaattcatacaggagagaaaccttacaaatgtggtgtgtgtggaaaaaccttcagctcgggttcatcccgtactgtacatcagagaattcatacaggagagaaaccttatgaatgtgatatatgtgggaaagattttagccatcatgcatcactcactcagcatcaaagagtacattctggagagaaaccgtatgaatgcaaggaatgtgggaaagcctttaggcagaatgtacaccttgttagtcatttgagaattcatactggtgaaaaaccctatgaatgtaaagaatgtggaaaagcttttagaatcagttcacagctggctactcatcagagaattcatactggagagaagccttatgaatgtattgaatgtggaaatgctttcaaacagagatcacaccttgcccaacatcagaaaactcatacaggagagaaaccttatgagtgtaatgaatgcgggaaagccttcagccaaacttccaatcttactcaacatcaaagaattcatactggagagaaaccctataaatgtactgaatgtggaaaggcttttagtgatagctcatcctgtgctcagcatcaaagactccacactggccaaaggccctatcagtgttttgaatgtgggaaggcgttcagaagaaagttatccttaatttgtcatcaaagaagtcatactggagaagaaccttaagaatgtagtgcatgtggccaagcctttagttatcaccaatcccctactgttaatcagagatgtcccactggataaaaaacatataaatgtaagaaatgtagaaaaaccttcagccaggaggctggcaagatggccgaataggaacagctctgatctgcagttcccagtgagatcaacgcagaaggtgggtgctttctgtatttccagctgaggtacctggctcatctcattgggactggttagacagtgggtgcagcccacggagggtgagctgaagcagggtggggcgtaacctcacctgggaagtgcaaggagtcggggatctccctcccctagccaagggaagccatgagggactgtgccatgaggaatggtgcactccggcacagatactacgcttttcccatggtcttcgcaacccacagaccaggagatcccccttgggtgcctatgccaccaaggccctgggtttcaagcacaaaactgggcggccattcgggcagacaccgagctagctgtaggagtttttttgatagcccagtggcacctggaatgccagtgaaacagaaccgcttactcccttgttaagggggctgaagccggggagccaagtggttcccatgcccactgagcccagcaagctaagatccactggcttggaattctccctgccagcacagcagtctgaagtcaacctgggatgatcaagcttggtggggggaggggcgccaaccattaccaaagcttgaataggtggttttcccctcacagcgtaaacaaagccatggggaagttccagctgagcagagccctccacagctcagcaaagcctctgtagccagactgcctctctagattcctcctctctgggcagcgcatctttgaaaaaagtgcagataaaaccctcatctccctgggacaaagcacgtgggggaaaggggtggctgtgggcacagcttcagcagacttaaacattcctgcctgccagctctgaagagagcagcagttcttccagcacagcgcttgagctctgctaagggacagactgcctcctcaagtgggtccctgacccccatgcctcctgacggggagacacctcccagcaggggtccacagacacctcatacaggagagctctggctggcatctggtgggtgcccctctgggacaaagcttccagaggaaggaacaggcagcaatctttgctgttctgcagcctccaccggtgatacccaggcagatatggtctggagtggacctccagcaaactccagcagacctgcagccgaggggcctcactgttagaaggaaaactaacaggaatataatcaacatcaacaaaggacatccacacagaaaccccatctgaaggttaccagcatcaaagaccaaaggtagataaattcacgaagatgaggagaaaccagtgcaaaaagcctgaaaattccaaaaaccagaatgcctcttctcctccaaaggatcacaactccttgccggcaagggaacaaaactggatagagaatgagtttgacaaattgacagaagtaggcttcagaaggtgggaaataacaaactcctctgagctaaaggagcatgttctaacccaatgcaaggaagctaagaaccttgaaaaaaggttagaggaattgctaactagaataaccagtttagagaagaacataaatgacctgatggagctgaaaaacacagcatgagaacttcgtgaagcatacagaagaaaaaccttcagccagattgaatgctttacagggaagaattcatactgcagagcggtcttaacaatgtaaagaatgtgcaaatgtcctcagacaagatgcacaccttgctcattagtgagttcatttcaggcagccagctcttcctcacccactacatcaccaagtcctgtggatatatctgctaaatatttttggaatttatccacttcttttggttccccagtccaaaacacagtcatttcacctggactatttcaatcattacacaggtgtccaaccttttgtcttccctgggccacattggaagaagaaaaattgtcttgtgccacacatacaatacactaacattaacaatagctgatgagctaagaaaaaaaaaaagtctgtgcatagttttagtgatacaccacctccgataagcaaaaaagtcctcacattcaatgggttgcatacccatgaattctaaaacttcatcctcttttgtccctttcgagttaacattacagccacagtgacctttcaaaaatgcaaattaagttactcttaaaactctagttaaaatacttgatgtacataaagtgcttagcaaaatgaccaactcatactaagtgcttagtaaatgttagataagtattctccagaattgatgtaaattatttttaaacagtgcattcttgaaagcagtatggcagtcataaaaattttggaaccaaaacagtatctttttttaagctaaaaaaaaagttttaaatggtgtctttctatgttgcccagggtggtctcaaactcctgtgctcaagtgaccctcccacctcattctcaagtggctgcaattacaggcaaccagcctgacttaaaacagtatcttaaggtagatggtgattagcacatgtagtatgcttaacatttaatattataataagacatcacagcggctgtctcatgattaaggctgtgttcccttgttggtgaggaaattaattatgacttgataaatagaacatgttttaagaagtggctatatagctctggataaaacgaacaaaagaattagaattcctgcggggaatatatacaagactttatttagtcaagtaaaaaaaaatcactaatgtttaactgaagaaagagaaattgaataatatagttctatttcaacatgtgggttcacagatttattctaaccttccaagtaaagttgttccactagtaaagttgttctggagtatattttttttaaaaaaaacacttaaaatgttccacttctttcatgaggctaagtcaactctgatatcaaaccaaggggaaagaaatgaaattataggtgagtttacttagttatatacaaaaggaaattattagcctctgctgatggagaacagaggctgtgaataaatggagatccataacatgatcctacatgaatgtttcaatattgtaatcctgtaagttacttttacattgacagttctgaaattcatgttgagtgttaattaggcaggaatcagaagggaggttttgtagaaggtcgtatccatgggttttttatatttgaaaagtgttttcgatgtatcattgggggagattaaatgtctttgacagttgtccaactagaaataaagtcagcatcccatttgactccttacacagaagttcattctatactcattacagatgtaagaggttaagatggtagaggagaatgtagagtatttctgtgcctttaggttcaggaggtctttgataagcaggacaaggtccagaagccatgaagagagaatgacaggactgtgtagaagatttaaacctttttcatggcgtaagatactgtatgcaaagttaaaaggcatatgacaggctgagagatatcttaaacatacattagaaaggatatagcccttgaaaaagggctgttggaaagcagcaaggataaggtgcacagtcttgcagagcatgtcaacaaaatttattggatgaagaaattaaaatggttaaatagaagaagttctcaacctcactaatgatcagataagtgcagattgtaaaagtcctcatccccaccaacacaaaccagcagaaattttatgtgaatgtgaagtttggataatatccagtattgtcgcaggtgtgagaaaccgtattttcaaatattgagagggtaaattagaggaaagccattttagagggcaatgtggtgttacctgtcagcattttgaatataattaccctttgccacaattctacacctagtcagttatgttctcaaaaagcacaagtgcagaaatatagatgcataagcaaatgtgttgcagaattgtgaaaaatttggaaaaaatgtttagtgctattaaagttatgggttacttaagttacagaaaatcagtttagtagatcactgtgtagttacggaaaatgagatggatctctactcaaagatgtcttgcagtttatgaactgagatgtaacttcatgactaacatgatgacatcgttattaactacataaactttataaagcttaaaaaatgcattcatagtatcttatttgttgtttttgtttacaatacaaatagaaaccatgcacacagatacaagaactccttccctgttgtttgtttttgttttgttttgtttttggtagcgggcggggtgagctgctctcatgttattccatgagtttttttatgtgttgcttgttgtgcatggttcattttttgtttttattttttgagacggagtctcgctctgtcaccaggctggagtgcagtggtgcgatctcggctcactgcaacctccacctcccgggttcaagcgattctcctgcctcaccctcctgagtagctgggactacaggatagtctcgatctcttgactcatgatctgcccaccttggcctcccaaagtgctgggattacaggcataagccaccgcttccagcctgtatatggttcatttaaatcaaatgagatactccttgagacatgggggaagttgaatgtgagttatcctttggccaagacttaaagatggtatatgagtttgtctgctgtgctccctagacctgacccgattcatgcttctgccaggttgtaaacctgttttgtcctgctgaattggcagagcagtcccaaaagaactgtaactaaggtatgcacatactgaagaaagggatatagtatttctgggagagccctaaggaaggtagacttctgttgcagtcattctgaagaattatgggtggtgattcttgcacaagcccagctcatacatctaggctagatgatgcttagatatctttatcagtgcctggggatgttttaaggcctctggttgggtttaagcctgctgggagaaacctcggctaaaaacagttgaaaagcttttcctgatcctgtgcttgagagcagcattttacctctagggagtgctttacttgccatccataggatgctaggcacatttcaaagaaggactgttttaggaaagtggtttcttatctcttaaatgtattgaggctcattttatggcctatcatatggtctatcttggagaaagtcccatgcgctgttgaatacaatgtgtattctgtggttgttggatgaaatgttctgtatatatctgttaagtccatttgttccaaggtatagtttaattccattgtttctttgttgactttctttttttaaaagtttgagatggagtttcactcttgtcacccaagctggagtacaatggcatgatctcagctcactgcaacctctgcctcccaggttcaagtgattcttctgcctcaccctcccgaatagctgggattacaggtgcctgccaccacacccagctaatttttgtacttttattagagacagggtttcaccatgttggccaggctggtcttgaactcctcacctcaggtgatctgcctgcctcagcctacccaagtgctaggattacaggcatgagccactgtgccagacctctttgttggctttctgtcttgatgacctatctagtactgtcaatggagtattgaagtcccccactattattgtgttgatctctatctcatttcttaggtctattggtaattgttttgcaaatttgggagctccagtgttaggtgcatatatgtttaggattgtgatattttcctgctggacaaggccttttaccattatataatatccctctgtctcttttaactgctgttgctttaaaatttggtttgtctgatataagagtagttacccctgcttctttttggtgtccatttgcatgaaatgcctttttccaccctttaagtttatgtgaagtccttatgggttaggtgagtgtcataaaggcagcagatagctggttagtgagttcttatccattctacagttctgtgtcttttaagtggagcatttaagccatttacattcaatgttagtattgagatgtgaggtaccagtgcattcatcatgctctttgttgcctgtgtaccttggtttttttttttttggctttttaactttttttttttgtattataggtcctgtgtgatttatgctttaaagaggttctgttttgatatgtttccaggatttgtttcaagatttagagctccttttagcagttcttatagtggtgccttggtagtggtgaattctctcagcatttgtttgtctgcaaaagactgtatctttccttcatatataatgcttagtttcactagatacaaaattcttgggtgataattgttttgtttgaggaggctgaagatagggactcaatcccttctagcttgtagggtttctgctgagaaatctgctgttaatctgataggttttcctttataggttgcttgttggcttctgtatcacagatcttaacattatttcctttgtcttaactttagataacctgatgacaatgtgcctagtgatgatctttttgcagttaatttcccaggtattctttgtgcttcttgtatttggatgtctagatctttagcaaggctagggatgttttccttgattatttccccaaatatattttccaaacttttagatttcttttcttcctcagaaacactgattattcttgggtttggtcatgtaacataatccctgactgcttggaggctttgttcatattttcttattcctttttctgtctttgttggattgggttaatttaagaccttgtcttcaagctctgaatttcttctacttgttcaattctactgctgagactttccagagcattttgcatttctataagtgtccaatgtttcttgcatttttaattttttttctttatgctatctatttccttgaatatttttcccctcaattcttgtatcactttttggatttccttgcattgggcttcacctttctctggtgcctccctgattagcttaataactaacctttttcaggtaaatcagggatttcttcttggtttggatccattgctggtgaactagtgtgattttggggggtgttaaagagccttgttttgtcatattaccagagttggttttctgattccttctcatttggatatgctttgtcatagggaaggtctagggctgaaggctgttgttcagattcttttctaccattctttttctattcccttgacgtagtactctccccacttttcctatggatgtggcttcatgtgagccaaactgcagtgactgttgtctctcttctgggtctagccacccagcaagtctgcctggctctgggctggtactggccattgtctgcacagagtcctgtgatgtgaaccacctatgggtcgctcagccatcgatatcaacacctgttctggtggaggtggcagtggtataaaatggactctgtgacagttcttagctttggttgtttaatgctctatttttgtgctggtttgcctcctgctgggaggtggcactttccaaagagcaccagctgtggcagtttggagaggaaccattggtgggtggggctgtagaactcccaagattataagccctttgtcttcagctaccagggtgggcagggaaggaacatcaggtgggggcaggtctaggtatgtctgagctcacactctccttgggcaggtcttgctatggctgctgtgggggatgtgggtgaggttcccagatgaatggagttgggtacctaagagcattatggctgcctctgctgagtcatgctggttgtcagggcagtgggggaaagctggcagtgacaggcctcacccagctcccacacaaacgaaagaaccggtctcactcctactgtgaccccccaacagaactgagtctgtttccagccagtggatgaaccaggcttgagaacttgccccaggctacgagcctccaaactgcaaaagaaaagggcttcgttctttcctgcctgcagagtctgcacacctgatctgtgccctgcctcaagttctgaccaggaggcttctcacccagttcaaagtgtcacaaagtgcagctggagatttccttctccctttggtgttttccccctctcacctgagtgccctcccagtggatccctgtggtgccaggcaggaatggcctgcctggggtccagcaagctcccagggtctttcccgctgcttcctctatccctgtattttgctcagctctctaaattgactcagctccaggaaatgtcagaaacttctcccacaaacagaccttcagtttctccagttggggtggggtatgtttggaagaggaggatctctctttcccatttccgaagttggggcactcacagtatttggggtgtctcctgcctccttcagagggtctgtgggtactcttgggatttctggtttgttcttgcagttgatctggagctaaaattcataatcggaaatggtattgtattttgaattttagttactgcctgttcattgctctgaagcagtgtttttctccccccaactttttttcctttgtgcttcagattggataattgccatcaatctctcttcaagttcacttagtcttacttcttttgtttccattctgcttttaagcccagtgaattttttatttcacatgctgtgtatctcagtttgatgaaggccaatttatcactctactgcttttaaagtaggctcacaaaatctaacctaagtgaggtttcacctcttggtctgaggctttttttttccattttccaattaataataagttatgagtaaatattatttataataaaagacaaagtctatgccactgctttccattttcaggactacctatggaaacctttgctttccagtctgatgttgacagaccattttaaccaaagctgaatgaaagtatttggggtttataataattttattccatcttcttatccaagtaaggaagctctccaccattcctagtttgctaaggctttttctttttaaaatcacaggtgtgagctgcattttatctcaatcatctattgagatgattccaggaactgtttcatccttatttattaatagtggtgaatgatattaacaggctccccaccgtggcactcctgtgataacttcttggcagtatgtactgttggttacctgcttggcatccagtctcctttttgtcttttctaacaaaactcaacttgtgctcaggtgtctcttccaccctcagatgattcatcgaaagctgactgaattcccagtgacaggagtagactgcccttcatcttagccagatatcacaaggctattcctgagtgactaaggaaagacttatgtcccatgatgtggtaaggccctatggacataaaacataaaatacctctccagagaaaaatatagaatcagaaattatgattttatagaaaattcatatttttaatcagtagattccttggataactaaattcattggactaagtattatttcccaaatcaaatgtcattatgttgtacattctgtttgttaaacatctgacacctaagcatatgacatcctttctttgtgctataaattttatttttgcctattgtgagtatatattactctttatactgaatttttaaaaaaattaataaaacaatttataaatatggcaaatgtgaagattggcagtagttcataagttgtatcagcttaatctaaatgattcagccgggagattattcatctttcttgttggtttctgtttttcaaaaagctatagttttgggtttataaaaaaagcacagtgtaactcctggtggttaagatgagatattttgtcaacttcctgctgcaggagaacttaataatgaaattattcttatagctctctaaaaatttggatatattgaaatatttttcttcataattctttagtgtgcttctgttgcttctctgctaaatatgaacaaggacgcatatagccccatataataggaaaataggatatagcagtcatttgaggataagtgactgctacaataagataaaaaaggtattgtcaactctgtcaataaagaagatagattttattgccttctcaagtaacagcttcccatgtaggtaggtagcaggtcaaggcaagaagacagctttgctccatgatgtcatcaaaggacctggttccttctatgccatttctccatcaactcaggatgctgtctttatccacataggtgatgcctctacattccagaacatgaaagtattctgacatatcttccttggacatgacatatttttctatgtattgctggactttgtttattgtcactttaggtaggattttaatgtgtatgttgtccctgaagattggaattctttccctacttaaattctttccctactgtccttgtccagttttggtatcaagggtgtctagttttaaattctccagtatagttttataggataaggattatttattgctttggtattcatggaaaagcctgagaacttatttaatgattttccatttcttcttgagtcagttttggtacttataattttctctatggtaagcccctgcatatgttttaaatatattgagataaggtgatcacagtatttgcaaaattctaaaaatttctgtgattatgtccactttttcatttctaataccatttctttgattgtttatttctctttttttctgctaagccatctttagcataactttcatcctcatgatgccaaggtggctgtttgcagcggaccctatccttgttggactgaacaaaggatgacaaacatgggaataaagacaaagacaaaagagtatatttggaagaagaggtctgggggctccttgcttccagtgaacacaggccctgagcctttacagcccttcgtatttattagagtgaatagggagaaggggggtggttgtcggtcagtagcttgatttacagcaggcttgcaagactgcattcgtcaaccaataggctctagatgtcccattagataacctcaaggagcatgacaccagggagtgattgccttcagcaaaccttctggtggctggagcagaagcgactttgcccacattctgcattcatgataaacagtttgctgtttgatcatatagcctccagtggaatgttgagttggccacgatccctttgccagctctctacagctgttctacctgttgacatcctgtgtcatacccaagcaggaagaaggttgtgtgagatgacaaaaggccagagttacatgccagctgtgtctctttccacacatccaccaaacccccagcaaatgtgtacttaaaattcattggttacagagccactactccttacaaggagactggggaggtgagtattataagctgggcagatggccacttgaagagcatcaatgttctgctgtggaaggagtgcaaaatagacaccagagagaccattagcagtgtctgccacagctattacatggctaggtccacctgactgaaactaagccttttctatgagactgaagtgctttgagagaaatgctgaccttgtcctttctgcagcttgcggctttcagtcacccttggattcagagatagaagtcatcttaattccatcactgaggccaggagacctgaaagaaatcaattcaagagtaaggagaccaggcgtgcagtgtgactgggcgtgcagaggtcagtgcatctgtgatgactggtgtaacagcatcactgcctgtgagccagcaaggcccttggctcccaggatgaagctctccagttctgataaggcccctgggggagagaccggtcctaaacatgttcaagaataaatccatcagctaacttcagaccgtgattcacacaggaagggaactttaagaggtcgccagggctggtatttttgagacgttaggcagccctctctgaggcgatgacaagtgaatggcataaaggagccagcccagacgaaaatttggggttagactatttcgacccaggacgtgcaaatacataggttacaaaatggaaaatggtattttggaggatgggaggcccgtgtagccagagataatgggagaaggtgagggggcacccaaaacaatcccacaagctctctacatcccccttcctagcccacacacatcacccatcagagtgatcctccggactccggaggcccccaagattgcctttcccttcccggtcggcagtgacgctcccgcaaggagctgacgcccaggcccttagcacctgtcacagccaagcacccttttactccggccctgcggtcccacccctcgccgcaagccccgcctcacccggtctgccgctgcgcctgcgcgactcccagaagcctttggggggtgggtgtgtagtcagagcggcctctgcttccggccacacccaggcccagcgttggccaccacttatgcggcggctgcggtccagggacaagtgagagcgacccgcagagggcaggacggacgggcgttgcataggcccggggccaaaccgtatcttgcaacctgagctccgagggccgccgcatccgtccctgcttgggactacgcttcccagcgggcattgcgccgaggccacgcccggttccggcggcgctgcctgcgcactggaagtgggaagcgccgggcttctctaggctgaggggcggggcggggcggggcggggcggggcggggcggggcggggcggggcggggcggggcggggcagcggggaggggtggggaggggcggggcgcggccgggggcggggcggctccgcggcgcggcccagtggatgccgggccatgggggagcgcgcgcggggctgttcgctgggcgtggcgggcgggtgtggccaggggtgtgggtctgtgagggaccggtcggaagggcgtcgcgcggcctcgggtgacatgcggggggcggcgagcgcgagtgtccgcgagccgacgccgctcccgggtagaggcgccccccgcacaaagccccgggcgggccgaggcccgactgtagggactccagccaccttggccctccctgcccggggaaggccgcgctcaaggaatggcctcgcatccaaaggccagcgaggagcggcccctacggggcctgggcacagaggtgagagtgacaggtgtttggggccgagcggacagggacgaattcatctcgggatgagatctgggagggggttgggctctcggggaccagttgctggagaactgtgcccctggtctttgaagctggtggagtgggagaatctgaagatttggaagctcaactgattcagagcagcaagccgcggtaaaagggtgttgactttcccagggtgactctaactagacgcttttcctgttttcgtgctcccagggaggaaaaaaacctatctccacgttgtggcagtccctaggcagggtaatgatctgatcccaccttttcatgcaggaagggacgtttctaggctggtgatttgggactgtggtgtagacctggtctctagctactcctttctctttcagctctgccttccagggacactgctcttccccaggagagaaacaagaagctggaggctgtggggacaggaattgaacctaaagccatgtcccaggtgagttggcatttcatctcttgtctctgaaatgcagtcttgcttttcgggacttaatgttgcttattttcttgaaagttttcagtttaagagacctgtttgggcgcgggtttctatttcttcacgttctagtgaagtgatgggctacggggaaaagtttaaactgcccggggcctcgatgcctgcttcttcttcatcccaatcagccttcattcttgattgatgaaatgattcagcctctcccttgtaccgcttttctcagagggactctgatggaggaattgtgccccttgaggaacacggcagactcttctgctatacatggtttgtttggtgaccactttgtgccagccactgagcaaaccaatagctaagccctagtccctgctctggagctcacagcctgttgacccaatgtcaaggaaacaagcaagattctagaatgtgatcatccttgggccaagtattatgagcgaggactacaaggcgctcctggcttccagcctcctgtagcggaagggtaggcctatttaccaaggaggtgatttttgagccttgccttgaagggagagaagatgtttgggaggcacagtaaagaaagacaacattttagggagaggaggcgcaatatgaaaggcttttccacttgattttgtggctttaaaacatgccagtaaatagttgtgtttgtttcggttggcttctcctataaatatcatagctagctcattaatagatgaaccatttcacttccactgaggcctcaaaaaatatatgtacagatgaaccagcttccagttgtcctacccaaactgctcttgagtgggttactgtgatcttcacattaccagatgcagtgctcaattcttagtcttttttgactatcattggtatttgaaatagctcagaggctggcaaacttgtgctggatgaggccacagcagaaaatatgttaggctttgaaagtcctgctgcatctactcctttctgctcttatagagctaaagtagccaaagacaatatgtaaatgaatggatgggctgtgttccagtaaaacttcagttacaaaacaggtggctacctatccctcaaatagctcatccctgtccttcaataggcccccttttttcccttggctactgggatctcacactcatctgactttcatcttcctgactgctcagtttttgccacagttcttacctccgtgacttgaacagagtgtgcctcagcactctgctcatggccctttctttttttgtctgcatgctgtctcctggggatagtagcctgttccttgtctgtacaacctacccacatggtggctcctcccagattcacattgtgagcccaaacctctcctctgagccgccggcctgtgtatcctgctccactcctctgcctgagtgtctgatgggtaactcaagacagcctgtccagacccgaagtcctgagagtctcccataaaccagctcctcccacagtttgagtcttagtcagtggccgtttcatcctctcagttactcagtccggaagccttgtcatgattggctcatttcttgccttttccttccatatttggtcctgatgcaaatcctgtcagttctatttgcaaattatgtgcagaatctggcagttttcatcacatctatcaccagcagcaggtccaagtcctccttttactgtgggcttcttgactgtgcttctgtgacctcctgcttctgctcacgctccccacagccccttcccgatgagcagccagaggggtctattcaaacatgtcaccttgtgtcacgctgtgctcaggaccctccagtggtttctctgaataaaagccaaaactcttcctgttactgaccaggccctacatgacctggctccttgttacccctgacatctacatcactctcttctttctgaaaaatcgccttctcattttcctgctcaccctgtctagaatttcagagcctcctacctgttcttcacatccctcttccctgctttgcttttttcttttagtacttttcttttgagacagagttttgctctgtcactcaggctggagtacagtggcgtgatctcggctcactgcaacctccgcctcctgagttgaaatgattctccttcctcagcctcccgagtagccaccacacctggctaattttttttttttttttttttttttttttttttagagacagggtttcaccatgttggccaggctggtctcgatttcctgacctcaagtgatccgcccacctcagcctcccaaagtgctgggattacagccatgagccactgtgcctggccctcgtagtacttttcaacatactatatacagaaatcccacgtataccaaaatttgcacttattcatcagccatgtggagcctgcagatatgagaagtcagccctcagtggacacaggttttccataccacaaataatcttttttgagacaaggtctcactctgtcacccaggctggagtgcagtggtgccatcacggctcactgcagccttgacctccccaggctcaagcagtgctcccatctcagcctccgaagtagctggaattacaggcatgtgccaccatgcccagctaatttttgtattttttgtagagatggggttttgccatgtttcccaggctggtctcgaactcctggcctcaggcaaccgcccgccttgggctaccaaattgctgcgattagaggtgtgattccccgcgcccagacaataattgtattttcagtctgcatttggttgaaaaaatttgcatataggtggacccttgcagcccagatccatgttgttcgaaggtcaaatgtattttacttaatttatctcagtttctcttgtctcatttccttacttcataggcaaggatttggggcagttttgcctaatgtctgatacagaaaatatttggtggatgaatgtttgaatatagtcttaaagttctcttgtggccagtgttttgatatttagtatagtgttagaatagtcatttttatacctgaaaatgtgcttcgtccctgatttttttattttgtttttttgcttttagagacagggtctcactctgtcacctaggctggagtacagtggcacagtcatagataattgcagcctcaaactccgggcctcaagcaatcctcccaccttggcttccaaaggagctggaattgtaggtgtgagccaccatgcccagcccctgattattttgtatgaatacattcctagaagtttttcttgcctcatggattaaggtttcctaagcttatgtgaaatcggaatacttctaaaattatttttggatagaacagcagtggtgcctcaaaagctagaattcatgttttgaaaaaaatgtacacttcatcaggaataatagttattaccaaataaatgtttatttgtatgttttaaaaattaactgaattgaatttaaacaaatctttttagtgtattttttctataaagtacttcatattcattcttttctatgaaatttcaacagaaagatttttctgtaagtataaagttgcttttattttttgttggtattcttttaatgtctctatctttgtgtgtgtgcgtgtgtttatatattatatagaatatattatatatgtatattttatatatatattaatatatgtatattatatatatatgtatatataatttttttaagagatgggagtctcactgttttgcccagactggagtatattggctattttcaggcacagttatggtgtactacagcctcaaactcctgggctcaaggaattctcctgcctcagccttctgagtggctgggcctataggcgtgtgccaccatacccagttcatatgtatattaagatgagttaacttacatcagatgcctatatcaggagtagattctgtgcctgtataatgttttctctgtggtatagtgtaaaaatgtgaaacccattttgaagtctgcatatttatgttgcagcaacaggaataagaacaggacctgcacatttgacaatgttttgtctccacctaaattaagtaggttgatccagacatcagttagggaaagttcattttatttttatctgaaaacatgttttctactggaacttgtttcactgtcagggtgaatggatactaagtattactgctattatcaaagtggaaccttttaatagaagtagaatggcaaagtggtcaaaggtcatggactaggttcacatgctagccctagcatctaatcattgcgtaaccttcaggcaactcaagtgaccacattttcttcatctgtaaaatgaggaaaataattggacctgcctcaagcagttcttgtaaggattaagttaagatgtgtatagtgcctggattgaggtacctggcacatagtaaggacttactagtgttagctggcagcatcctcatgtcatcatgacggttttagaaatttacaggcaagacacttagatggcgtacttcaaaaaaagtgtttaatataggaccgaactgggcaaattatggcctataggccaaatccagcccaccaccacctccttttgtgtggcccaccagctacaaatgagttctacatttttcagtggttgaaaaaaatcaaaagaagaagaatacatgaaaattaaatgaaagtcacattttggtgtccataaaaaaaatttcattgtagcacaacatacttgtttgtttatgtattatctatgactgcttttgtgctacagtggcaaaattgaagagttgcggccaaggctatttggcccacaaagcctaaaatatttactttctggctctttacagaaaaactttgctgacacctgaagtggaggttaagagcatggactgtggagtcagactcctgggttcaaaacccagctctacagctgactgtctgtgatcctgggcacattacagctcaatattttctcatctgtaaaatgggaatagtaatagtactgactattaggatcgttgtgaggattaaataagctaatatataagtatatagaattgcgtctgaagtgttgtaagtgctttcagctattgttattgctgttatttacagtaaaagacatttttaaaacaaaagtcattgattctatacataaagagctgtccgaataaacagaaaatgtcttaggaggatatatgtatattgctaacgttgggtccctctacgtgattacattgaaggcatttaacaaaccactggtacaaaagcagatcactaatgcatagcatgatcaacctgggaaactagggttgattcttcttggcaagcaaataagttcctcttcttttatgccaagatgcttcaacttgcaaaattattgctgagagctgaccagcatttgttttagactagcttcctcaggtagccatattagtgtgtcttttgctcaaggacattaagcagttcttggctgtttcctgcaagtattacctcatggtttacactgcagggggcctttcagtccccagcttaggagacttctccatgatgagtttaccatcaagagtgtagctctgcagttgactgattcaactccctctgcagttgatattcactcaaattgggatatcacttacaaaacccttttgacctatttttacacaattcagttacaaatgtccttaaagtttggtagcaggttaaagaacaagtgattgtatattattcagcagatatcaaacctcaaagggacttttgtttctagtagaataatgtgaatctttaaaaggttcagctcttggttggtgttgtggtttgttaagtgaggtatttaaattaggttttgtgtagtcagatgcagcatggtgagggacacttagagcagaatggcaaaaagattgtttattactcacagattccagagaacagtggccagcacaccttgcagggcttactggaagggcttggagacattgaggacacacatgcccagccaaagggtggggaccaagagagagggagggacctgtgggctggagcctttattggggttcagggcattatctaggtgagtttcccaagacagggttggcttggatactttgaagggagctcaaggctcagtaagggaacttgaaggctacattatcaggttcaccaggcttcatgcagaaggacagtagtcatttcatagtatggggccttttctatctagaacacacaaatggggactgggtgaggactgcctgaaaatatataggtcaagggtgacaagcagaggcagcatccctatggatgagagttatgacagtcagcatcattacaagtcatgttcactgcatgcttccattgtgccttgcacgttctaagtgctgtgtatgtgttgcctcatttaatccaaaacataatctacaaggttggtattgttgccttttccattttatagctggggaactgaggcacagaggcgttaggtaaccaagtgaggtttcagagctggtgagtgctggaattgtaattcagcttttggggtagtccaactgtttcgcatgttcatttcagtttagactttgaaaatcccacagctgctagtcagttaaatctgccttctgttagccacaggttcctgggattagagttgcaactgaatagatgtttaaaatacattggaacgtatcagagttgtaggctgaatttgtaaaactatgctccataaaaatctgccagcaggagctgagcagccccatcttgccagttggtcaagaaaatcctgctcatgccaagctgttagcaaatgtgctcctgatagctcctcataatgcctagcttctccaagatggcaccttggttcgtaaaggcatttcattaattaaaaacattatagtgctttttgtttttcattcttattacatattcattttagaaaaaaaaattgctagatttttttttaatgacctctactgaacactgagagtaaaaatagaaattcttagaacccagtttagtcatgaataatattgatgctttgaggttcatctcaagtttattgcccagttcttgtgctgcttcaggccactcacatgtccccatgttggacagtgctgtagtacctgttgtgcatagaacaagttagtctttgttatttatagttttgaattgatgtcaggggtttttcttgtggctgcctcctttcacctccacaaaactgcaagttctccaaagtcaggggctgtctccatatttttctcttttacctggagtttaagacagaatgaggctagctgtacaatacctaactagatctccacagttctgagtttatagtctcttactcaaaatgaagacaaggaatctttagatccctatattagtttgttagggctgccagaacaaataccacagaatgggtgtcttaaacaacagaaatttcttttctcaagcttctggaggctggaagtccaagatcaaggtgcctgcaggtttggtttcacctgaggcctctctccttggcttgcagacggccgtcttctctctgtgtcctcacgtggtcttttccctgtgcctgcacaccgtggtatctcttcctgttttaataaggacaccagacagattgggttagggccccacccatatgacctcatttaaccctaattacctctttgtaggccctgtctctaaatacagtcacattcaaaagtactggggattaggagtttaatgtaggagttttgtcaggggacacatttctttctataacaaacccccagtcatgtgggggcatgagcactggttgagcaagaacatggttatatcatttcagggcttggtgacatttggggatgtggctgtagatttctcccaagaggagtgggagtggctgaaccccattcagaggaacttgtacaggaaggtgatgttggagaactacaggaacctggcatcgctgggtaagggctcccaccccttttcccacccctcaccctacccacgtcctggactaagaagcctttcatgcctttatcacccagacctgcactgccctcttgcgtcaagccaaggggactgcatctcagtctggacagccacacagtatgaccaggttgttttttatgtgtctaggactttgtgtttctaagcccgatgtgatctcctcgttggaacaaggaaaagagccttggacagtgaagcgaaagatgacaagagcctggtgcccaggtgagtgtgggagaaccaggtagggtgaggccactgctggtcatagttcagctgactcagacacgcaacatcttcagcagactcttcctaagcctcttgcttaggaatatctgttatttttactatttgggaatacagaaatttcaactacagtattatttccagaacagcaaattattaagacaaggaattagaattatagatttctttcagaggttttatcctaacaggaaatggttacagtttctaaagcattgggaatcttacaaggtttctttgttcaattcacacttcaaaggaaacgcttgcattgacaacaggacaagttactgacagttataaattaaagtgactcacatgggtcatcatatagcataagagaacaagaatgtgtgaaagtttccaatttaacatcatatgaaatcacatactttgagctagtttaatgagatagaactgttttttcttcctgcagatcattcatctcttcttgagactagttaattgtgaagacttacatttttaaggccaggatctggacttttattagttagcatcgtaataaaaaaaaaggaggtatgtagagatagagatgaaattttttctagatgaaatggacaaggagtgaaaaagagttgacttaaagctgaaataaggatcatatggcagttttcttctatagcctccactttctctttatattagacattttattttacatttaagtctttgtgagctcccttatctcttgatttttaattgctttttccagtcttctgctaaaaacataatgtgaactcttattcaacttttaggtgggaaaggtcttattgtggcctttaggactatggctacacaaatttaggaatgtagggttggttgaatattgctagtaatataagaaagctttcaaaatgatatgcttttcattttcttccataaaaataaatgactatatgcttttttgtggcttttaatttaacggttgcattttggaatttttcttcatactaacacatgataaaagataaatttaccttctttacgtctttcagacttgaaggctgtgtggaagatcaaggagttacctctcaagaaggacttctgcgaaggaaagctatcccaggcagtgataacagagagactcacaagctataatctggagtactctctgttaggggaacactgggattatgatgctctgtttgagacacagccggtaagtcacaagacaaatttcaggcaagaggaaggatccttcatgaggaaactcttcttgagggaagagaccatgactacaacaactataagagaagttttcatttgaatacaatgcttcttatagacagattatcccctcagaacagagagtgcctaatctccatacacataagaacagtggagggggaaattgagttgtaatgaattacaaacaaatctgtcaaggtcagaaatgtttgacttgtgatgaatgtaagaaagctttgagcagaggccaggcgcggtggctcacgcctgtaatcccagcactttgggaggccgaggcgggtggatcacaaggtcaggagatcgagaccatcctagctaacattgtgaaaccctgtctctactaaaaatacaaaaaattagccgggcgtgctggcgggcgcctgtagtcccagctactcaggaggctgaggcaggagaatggcatgaacccgggaggcggagcttgcagtgagccgagatcgcgccactgcactccagcctgggtgacagagcaagactccgtctcaaaaaaaaaaagctttgagcagaatatcaacccctccttttcatcaaagatttcatacaagagaaaaactctgtggacttgttgaataatttgtatgaatatgggaaagccttccgtctgttaaaaggttcatactgtgtgtaagttcatactgtgtgtaagtatgacaaactctccatagcagaaagtttctcctatttttctgtgtttttccccaaacatgtatgctataactaagccctgtcattatttgacctggtgtaccagaacttaagttgcagttcttggtatggagtgccttttttgcagtgtggacacagtccatcccactgagaccaggtgagttcacgaacatggtttgatttaaaaaacgtgcttttaccattgcagggcttggtgactatcaaaaacctggctgttgacttccgccagcagctacacccagctcagaagaatttctgtaagaatgggatatgggagaacaacagtgacctgggatcagcaggtaaggatgtccctctcccatatttgaatctatcgtcgggtacctccatttccaaacttcagttttgaattatggaggagggagggggtgtcttctgacatgctggcctgaattttgtggattcctaagataagaatttggcatttgtagaggtgaaagttggtgtctttgttaggcttgaagcgttatcttcttgtgtctttcagatcctactcacctgtttttctgtttctttcagcagtaacacttttctatcaacaaggaagtggttctcaattttaggatgccaagactattggccaaacctcatctcttttcactttttcaggacattgtgtggctaagccagatttagtctctttactagagcaagagaaggagccctggatggtgaagcgagagctgacaggaagcctgttctcaggtgagtgcaggagagcctggtgtggaaaatctactgcaagagagagcggagcttttaccaaaaaggctgcatcctcactaatatacagtaggaaactttacccagggtctctgggtctggaaagaaaattgaactctgggagttccaaataattctttcctcctcctttgcccccttctctccagtaactgccatttccctgaagttccttcttttcttggccactgggacgtgtatcatccacttgcttccttaaatgatcttttctggaccctgatgcacttttgagctgacttccaaaggttttctcttctgtggttaaatggcctattgttttcatcatgcatccattcctgtgagaaccacaaattgaaagttatgggattgagccactctgctgagtattggcaggcgattggaaaaagggagaattacacataaatgtaagccatcagtgaattactctaatggaaaggataagacatgtttatggatagcttgcatgaagtagagtttgcagaatttcaaatagggcattatagagacaaaggagatgttgttcccagtggtgtctatgttttagtaggacaggtgggtagaagttgaattgcaagaaggtggaagtaaaggatcttttcctcttgatgcacaagggaaagaaaggaaatttccatagaaaataatggtttgtagaaaatgtaattgtttactgtttggcaaaagaatataaaaccgtgacgttatcacaacatacaccttagatccatttaagtcaggataaacacacattttttcacatagtagaaattacagtgtatattcagttacgcatacacgtttttcatgtggattccacgttgtatataccattgctcacttaggttgctttacatttcttagtattaaagatacaattataatagatttttttcaagttaagtgaaaactacacattttggggattgctgtattcctggatatgagcacctgctaggctctgaaagtttttttgtttttggtgactagcaacaattagatgtatgagtttaattgcatcttgaaagtattggttatttacatgaaaacttttgctcattatttgttgaaagattatacactaaaattattctttttttatgaaagaagttgaacattttttcgtaaatttggtttttctcttatcttcttgtaaaatgtctgtcatttgtacccagttctctcttgtgtgttaaatattttcttaacagtctcagtgactgctatgtatataagcatactaattctgtgatatattgtctcaaactattttcacatatggcaataagagttttaattttaattaggtcttttaaaattatgacatgtaaaaattttcaatttttatatagtccagtatattatttctaatgtgatttctcctatttgtgtggctaacaacttgacacatatagttctatttcatttttaatgactatttagtattatatgaatatatataatttatttaaattatttactgttgagtatatttaaacatttaggaggtcttctccagttttcacctataatcaacagtggtccagtttgtacatatcttcttgcttacatgtcagaatatttcttgaagatatatgcttggaaatgaatttgcatggtcgaagtatatgtatttttaaagtgtcatggatattttgctgtaccgttggtaaagaatatatgagaatactgtttctagacatcatcaccaatatgggtattttgtagtttaaaaaaaattttgccaagctgctagatgaaaaatgttttatttaatttgcatttccccaactacttacgatgttgagaatatgtgctcttaaatctgtttagagtttgtattctattcatagtgtgtttatactcattagtcacatttctattgggttgtatattttcctgtatttatgcaacattgatatgaatgctattttttaataagtttgataaaatttttccccaattttgtgtggtctagaagtttgcatatggtatttcttactatatagtagcttaacttgggaattatcttcatttatagaagcacgtactttgttgattttttcatttgtttcactcctatctcttaaaaaatgaatagatgtatagtcccatttgaatcatataatacatttgtttgaccttctgtaacttaattatttctctctcctttatcaccttccttccttttctttctttccttctcatttttcccttctttccttacctttctcttctgtattttgctgtgtggcctgttttttgtttgttttatttacatatttttattatagaagagtacacataaaatttaaccattttgaagtgtacaattcagtgacagtatattatgtgaggtgatatggtaattagcttgattgtggcaaacatttcaccatgtataagcatatcaaaacattttataccttaaatatatacaatttttatttgtcaactatgcctcaataaagctggaaaaatattgccaaaaagagagaaattgcaaggcttcattatagaatggccagagaattgaggatgttttcaggcttgtggaagtaaccaggaaaatgtgaaaataattgttttttttttttgagtcagattctggctctgttccccaggctggagtgcagtggcttgatcatagtttactgccacatcaacctcctaggctcaagcaatccccctgcctttgcctcctgagtagctggaactacaggcacatactaccatgcctggctaattttaaaaagttttttagagatagggtcttgctatgttgtgcaggctatgttgtcctggcctcaagtgatccgcctcaagtgatctgcctcaggtgatccacctcagcctcccaaagcactgggattacaggtgtaagccactgtgcctggccctaaatgtaatagtttttagagctgtaaaatgtatgttgatgaattcaccaattagtgaattaattcactagttttccttttggcagattcctttttcctagcacacgaaaaaggaaatatgtgttttcttggtatctttcaggccagcgatctgtacatgagacccaggaattatttccaaagcaagattcatatgctgaaggggtaacagacagaacctcaaacactaaacttgattgttccagtttcagagaaaattgggattctgactatgtgtttggaaggaagcttgcagtaggtcaagagacacaattcaggcaagagccaattactcataacaaaaccctctctaaggaaagagaacgtacatataacaaatctggaagatggttctatttggacgattcagaagagaaagttcataatcgtgattcaattaaaaattttcaaaaaagttcagtggtaataaaacaaacaggcatctatgcaggaaaaaagcttttcaagtgtaatgaatgtaagaaaacttttacccagagctcatctcttactgttcatcagagaattcacactggagagaaaccttataaatgtaatgaatgtgggaaggcctttagtgacggctcatcctttgcccgacaccagagatgtcacactggcaagaagccctatgagtgcattgagtgtgggaaagctttcatacagaacacatcccttatccgtcactggagatactatcatactggggagaaaccctttgattgcatcgattgtgggaaagccttcagtgaccacatagggcttaatcaacacaggagaattcatactggagagaaaccttacaaatgtgatgtatgtcacaaatccttcaggtatggttcctcccttactgtacatcaaaggattcataccggagaaaaaccatatgaatgtgatgtttgcagaaaagccttcagccatcatgcatcactcactcaacatcaaagagtacattctggagaaaagccttttaagtgtaaagagtgcggaaaagcttttaggcagaatatacaccttgccagtcatttaaggattcatactggggagaagccttttgaatgtgcggagtgtggaaaatccttcagcatcagttctcagcttgccactcatcagagaatccatactggagagaagccctatgaatgtaaggtttgtagtaaagcgttcacccagaaggctcaccttgcacagcatcagaaaacccatacaggagagaaaccatatgagtgcaaggaatgcggtaaagccttcagccagaccacacacctcattcaacatcagagagttcacactggtgagaaaccctataaatgtatggaatgtgggaaggcctttggtgataactcatcctgtactcaacatcaaagactgcacactggccaaagaccttatgaatgtattgagtgtggaaaggcattcaagacaaaatcctcccttatttgtcatcgcagaagtcatactggagaaaaaccttatgaatgcagtgtgtgtggcaaagcctttagtcatcgtcaatcccttagtgtacatcagagaatccattctggaaagaaaccatatgaatgtaaggaatgtaggaaaaccttcatccaaattggacaccttaatcaacataagagagttcatactggagagagatcttataactataagaaaagcagaaaagtcttcaggcaaactgctcacttagctcatcatcagcgaattcatactggagagtcgtcaacatgcccctctttaccttccacgtcaaatcctgtggatctgtttcccaaatttctctggaatccatcctccctcccatcaccatagcctcgagacgtcatttctgtttgactactccagcagtttaaaaccccatctccctgcccttttgttttctttttgtcccttattagttagttcttcacataagtgtaaatgtaacttattcactcctcttgtaaaacttatagtttctttaaattggttaatgtgtgagatgtgctcagcacagtgcctggtccatagtaagtgctcagtaaacttagctgttttaaaaactttgtatttgaacattgaaaagttacagtagtcagctctgataaaaaaatgatgcagtagggtgagggtaggaaaaagcacattttctatcaggaacagaattctccagtagtgggtgaggttttgcctttgttggttttaaaacttgattctataatgccaagttagttttgtggctttccatctgaccctatgtgaatgtaaggtgatgtgaccttgttggtgagaaaattaaactttacatttgacttgatttgttttagaaagtctagggaccatgaatgaataggccagctgggacaaatgaatttaaaaaatcagaaaaatgcaagatttatatgcatgaagttaaaacaactgacgttactcaagaattagaaaactttgcaagatttgacttgtttaaaaatcacatttataagtgaaccgtattaaaacttttaaggaaccattcattgtgaggtaaactgatccagaataggggtcagcaaactatgactcatggccacagtctcactgactgtttttgtatggtccatgatctagaatttaaaaaaattttaaagggttgaaaaaagtgaaaagaatattttcaacatgaaaattatatgaaatttaagttttggtgtctgtaaataaagttttgttggcttcagccacacagtgatttacaccttgattgtgctgcttccaggctgtagcagcagagttgagcagttgtgacaggagaccatgtggcctgcagagcccaaatatctactgtctgatcctacacagaaaatgtgtgtgatccctgctatggagcagaggttatcaaactaaagcccatggaccaaatcctatctgctgcttgtttttgtaaatagagttttatcaaaccacagccatgcttacttgtttagctattgactatggctgctttagacaactgtgacagactatatggctcgcaaaactgcaaatatttcctatcctttaacagaaagtttgccaacctctgctctagagtagagaaaaatgtataaaagattttaattttatgagggcaatacaactgtcacatcagaaacaagaaaacaaatgataaaggaactcatttatcaatagaggtgaaaggaaattattaaactatattgaaaaataaagatgtcaataaaaggagaaatgatatttttctagatgaaatactcaatattgttaaaatgtttgtaaattataattcagtcccagtaagatatatttactttgacggtaacagggaagcataattaggcaagaatagcaagaagttttttttgttttgttttgttttttgagatggagtctcactctgttgcccaggctgaagtgcagtggcgtgatcccggctcactgcaacctccgcctcccaggttcaagcaattctctgcctcagcctcccgagtagctggaattacaggcacctgccaccacgcctggctaatttttgtatttttagtagagatggggtttcaccatcttggccaggctggtcttgaactcctgacctcgtgatccacccgccttggcctcccaaagtgctgggattacaggcatgagccaccacgcccggccaagaatttttttttttttaagagatggaggcctcactctatcatccaggctggagtgcagtgctaagatcctagctcactgtaaccttaaaatattttttttgtagagactgtgtctcgctttgttgcccaggctggtcttgggctccttgcctcaagtgattctcctgcctcactcttccccaaaatttttgaaatagatttctttgcatatgagattttagtatataatggcactattatttcaatatcgggaaaattatgttttgacaattggttatccaccctctccaagaaaaaagttagaagcacatttacaccttacagagaaatatgactatcatatttgacatatctaatcataaaataacatgttagaggcaaatgtagaaaaaaggaacgtattatcaagtaggacatggagtcctagaagccataaagaaatcgagaacaagttgggctatgcaacgatctaaaacttcagcatggtgaaaggcaccaaaaacttgtaaaagacagttgaagggaaatgtatacaacttatagaaaataacagaatgctgttacatatacagagcagtggggaacaacttgccatgcacactgataggcgaatcaccctgaagaatccaaatggataaagaaaattcgtgaaattcttaacctcattaatcagaagaatatgaatgaaaccacattttcctggctcttggtagattacaatataaaatttggataatatccagtaatggtattagtgtgggaaaacaggtacttgatcactattagcagtgtaacttcgtcccctatctcctcggatggcatgacctatcaacattataaacgtgaatttttttcaaacagtaattccagatctaggaattttatcccattggaataaataggtagatataaatattgttttcttgtagaattgtttcaattatgacaaataagaattcagcgccctgccaagtggattgactaaattgtagttattcagtactgtgttgtgcgattagtagaaagcagttaagctctacatacacttctatggagtggcgtctacaacatatttaatgaaatatgtggtttacagaaccttacaggtaaaatgacctagtcatagagtcaaaattaatactgaatatatatgtgtgtatgtacatacaaacacatgcacagcctcagtatctatgttgaaatctggttttgtctttaacacacagacttttcctagcattttgcgggcactttccctttcttcattctgtattgttctgatgaactgtcagtgacacatgctccaagtaagacaaccagattcattctctgtattttgattagagacacagggacaggaacagggccaatattcagctttatgaaccagtatggccagaatggatgttttgttttagtcaatattcattttgattggtgggacctttattatacctgctgtgaagtatgtgggatatgactcctaggctggaattcgtttgaattaagtcatcctttggcagcaacctaaggattcctccacctgtcactgagatccattgagatgattcctgctttctcacatcttggttttgagttaaattctttgagtctgtgaactacctggtattctaatatttctcattttaagtcagagtcaaatactttggttctcaagcaaagagagctagccaatgcagaaatttatactacagaatgattactagactgtagagaagcagagtattcaagatggatgtccagtgagacagatcaaagcacagatgaattcctaatcctattttgtgctgtgaaaggatattcatgatatagcaggatcctaagcccattgtgcactagggtctggatagctcctaccaaaaacaaaggtattgaggaatactacttccaaaagtatatatgatacctgtttataatgaaattgggtaattaaaatttcaaggctacttgaaattctggccttaaggaattgaatcagtacctgtatgtctgtgttgggaagaatctcatactccttttaagcatggggctgtatttgctaaaaaaggcagcagtagatgcagttatttgctcaacaatgatgcttactgaatgaaggggtggcctgcccctccacacctgtgggcgtttttccttgggtgggacgagagactgagaaaagaaagagacacagagacaaagtatagagaaagaaaagtgggcccaggggaccagcactcagcatacggaggacccacgcctgcaccggtctctgagttccctcagtatttattgatcattatctctaccatctcagagagggggatgtggcaggacaatagggtaatagtggggagagggtcagcaggaaaacgtgaacaaatgtctctgtgtcataaacaaggttagaaaatgtgctgtgctttgatatgcacatacacaaacatatctggtgcattaaacagcagtattgccgccagcatgtctcacccccagccttaaggcggttttctcctatctcagtagatggaacacacaatcgggttttacaccaagacattccattccccagggacgagcaggagacagatgccttcctcttaactacaaagaggccttcctcttttaataatcctcctcagcacagaccctttaccggtgtcgggctcagggacggtcaggtctttcccttcccacaaggccatatttcagactatcacatggggagaaaccttggacaatatctggctttcctaggcagaggtccctgcagccttctgcagtgttttgtgtccctgggtacttgagattagggagtggtgatgacttttaacaagcatgctgccttcaagcacttgtttaacaaagcacatcctgcatagccctaaatccattaaaccttgagtcgacacagcacgtgtttctgccagcacagggttgggggtagggttacagattaacagcatctcaaggcagaatttttcttagtacagaacaaaatggagtctcttatgtctacttctttctacatagacacagtaacagtctgacctctcttttccccacactgaattcacaaccgtgtcacttctgttaagcaattagggaaatactggaatttggattattggaatgagactaacaagaaggattcaaggatcttacaaaactttgactctcccttgactctccctctcaacccttaagcaacctccccactgattctcctctccatgcttcccttgtgactggaaacaaaccttccttccttccttcttcctttccctttcctttcccctgcctttcttcttttcttttctttccttttctttctcagagtcttgctatcccccaagctggagagcagtgatgtaatcatggcttgctgccgccttgatctcctggcctccagcgttcctcccacctcggcctcttcgagtagctgagactacaggcgtgtgccaccacacccagaatttttaaattttttgtggatagttgtgccatgttgcccaggctggtcttgaactcctgggctcaagtgatctgcctgcctcggccttctgaagtgctgggattacaggtgtgagacaccatacccagcctgtgactgaaaacttgattgtcccttttctcacatggtcaccattattgcttggctggtaaccaaaatcagagcttagtatgacctgtagtttgaaatacagaaagttaggaaagagattaatctcacccagaaatatttaatttccttcattaattgtaacatctaaaatctagggaacattgttgcaagtgtattttcagggttagaaattactttgcgtaatatagatggactgaaagaattcagaagtttataatgctggattggatcatttatgtccatgcccttcactcatctgcaagttcccatcagggcccaatagcctttccatattcctttgacatgaaagaagcactgaaaaatgtccctatatctccacctttaggtgcagagacttttcatgagtgattacatttgaaaagggtatccgatttgtgtagaactgtggcatgtgtagtggctggattatagggcaatcattaactatgagaagaaagtaaaaaggttataacaaacctcagaactctagagtgttctgatttctgatatttccactgtaattaataattgatccccagcgttgaaactgcactaaggttttattttaattaaaaacactccatggcatggcatccaaatctcacattgacttaaatcagtggcacaggactgggtcattcaggagtctgaatgactgtaattaaaatttctatgaacaattccatgggaattcgaaaaagacttgcatttatgcagagtgagggcttatggaagaattcttatacaagcgtagcttagaacaaggtctattgagaccacaaatgcatactgtggctatttttccaggtcctgggtgtgcatttgttaatgatatctatgatatgagatgtgactagatgaccaccaaaagtttgtgttcttttctattgtctggaattgatcctgggatgtgtctgcccaggcacctttgcttccagttttgtctatcagatgaattttcttcagtgtggtgtgaatagaagcaatatggcactcagggcttggtttttaagaaaaggatgttctgtccagacggaagtagaatcttaatcatatggaatggcaaagctgaaagatagaactctgtgtccctaaaccactatttggaggaaagctccccagtcatcaaggaacaccagcaatggattattatatgagtgagaaataaacttatattgtgttaaggtaatgatatttggatttcaattgtaatagcagctactataattctaatcaatataatacctttgactaatgatagaattcctattttccctgagttatagagtaggaactgtgatggcgtgttagttgcctgttgttgtaacaaattatccccaaaccttagtggctgaaaacagatagacgttcattacctcagtttctttggggaaggaatctaggcacagcttagttgggtgcctctggctcaaggtctctcagatggctacagtcttagctgtgggccagtgctgcagtcatctgaagattttgttagaggataatcagctttcaagctcaagtaagtgggcaggactcagttccctacaggctttggctggacatgttggttcctttccatgtgggcctctctgtagggcagcttacaatatggcaagtggcttccttgaaaagtgagtgagcaggagaggatgcccaagatagaagatgaagtccttttgtaacctaatattagaagtgatatcccctcatctttgtatttggttaattaggagtcactaggtttagcctaccttcaaggggaggggattacaaaatagtttgagtaagaggaggtggggaactttgagagacatcgtaatggctgtccaccacagtcttcctccgtccccacctcccagtgattcatttcccttccagatgcagaatacactcactccttccaaggcccctctcagagtctcacctcattacaggatcacctcaaagtcaataatcttgtcatctaacataggtacaggtgctaatgaagcccataagatatactttcttaagtatgggtattgatctgcagacctttagacttaaagaaaataaagaacaagttatctgtctcccctcctccaccacccctaaccgatacagtggaatcactgctccatagcaattctgaaatctaaccagacaaatgtttggaaattcctttattaggtcacatggcctgggataattatccaccatctgaactcttggttctgccctctgaatccttttttcctgcaacgcatttgcagttcaatagctttttttttattattatactttaagttttagggtatatgtgcacaacgtgcaggttagttacatatgtatacatgtgccatattggtgtgctgcacccagtaactcgtcatttaacattaggtatctctccaaatgctatcaatagctttcttagcttgcttactagagttttaggaatctagtggcgtctcttcattttgtgctgtctctgtccctctcactccagttggcagagtttctactgagtcttctgaaaatgttgtgggcttcatgagaacctcattggggttcactgcacaagacaaaagccacagccacaaatctctttgagataagcttcttagaggcctaattatttgaataagagtgtctgtcaggtcgccttaatctctttacagagcttttgtgtggttaaatagtactgagataccagctttggtctttctgaggttctggattttacagccatgcccttagtttttatctagaccagttttcctagcagtaacttggatttcatttttgcttggaagccctttcttgtttttggcattgtttgccacctacagaggctaagaattttcaaaatcctaatgtcctctttgttaacagttattccctcaatttatatctcttcttttgcatgtttctgtaagcagcaagaaaacaacagcaacaggacattcagcacattccttgaaaatcttagctacgtcacccagttcttcttcctgcattagctgcaaataacaggctgctaaactttctgccattacataacaaggaccctctttcctccagtttttaatggagtatttctcactatccttttagccttcaccagcacttaagacccaaaatttctggacagtcccttttctatacaagtattggacaaactccaagcatcccaacaaaggctttagcattacctgtctcagtgagacaagagttggagattgagttcaacacagtgaactgcctactaaaaacaaaattcagacggactttttgtctgtagagacaacagagtctctacagtgtgttactcatagagtaagaattattagatatgtgaaaacataagccacattcaagagaagaaagcaatacaaatccttaaacactggtattagcaaacaagaatgataaagcccctattataattattctgaatgacataaaggaaaatgctattaatggatgagcagatgggaatttcagcaaatgagtaaatcagtttgaaaatgggaattctaaaactaagaaatacaatgtttgaaagtaaaaatccactggataggtttaacaggaaatttgaggtggcagaatagttaatgaagttgaatatagatagaaattatttaatctgaaacaaaaaggattgaaagaaattaaaaggactgaatagtgctggtgataatgtcaaaaggtgacttgtgataatgctttgtgttctctgatcttcctagatctgtggtttggtgtttgttttcttgcttttagagacaaggtcttgctttgttgcccaggagggagtgcagtggcaggataatggcttgctcaagcaatcctcccacctcagcttctcgagtagttgggactacaattacacagcaccacacccggctaatttttgtatttttttaaagatggggtctcactatgttgcccaggctggtctcaatctcctgggctcaagcaatcctcccactttggccccccaaagtgctggtatgtatcacaggcatgagccaccacactggcctggtgtcctgtcattaattttagaaaattctcagtcattattcaaatattttctctcctttctctcttcccctcctggtattccagttacgcatatatttcaccttctgtaattgtcccatggttcttggatattctgttctttttcttttttcattctttttttttcctctttgtatttcagtttgggaaatttctattaacatatcttcaagctcacccattcatttctcagagtgtcttagtctgaggggctcactaaaggtaatcttcatgtctgttacaatggttttcaattgctaggatttccttttgattccttcttacagtttgcatctctctgcttacattacccatctgttcttgcatgttgtctactttttccaagatgcttctccttctgtgggcttccctaagaactccttcttaaatagagtctgtgccttgcagttttctctgttgtaatctactgttattgaccagagccccattagtgtggcagtgaggtacagtggggagggaagcattctataatcttattattaaatactatttttctagtgggcttgaggccttggactgtgatcttcagaagcacttcttagcctttcaaaaatcctgccttactgagacagacaggctatagagggactggagctggccaattgcctctccccaaggtccaacaagactctagtaagtagtttttcttggagtgcaggtgtttattatggaaaatgtggtgcttacttttctcctccccttgcccaaaaacctgagatttttccccattcttcactgagagaatttgatagggtttctggaggtaaaattcacgaaagtgtgggggcccatctaagattgggcccctaggagtttttaactcacaagttagcccacactaagcctccagcaattcatcaaaattataaaaaataaaagtttttaccagtttataactccagtggcttctgcttcaagtaagctaatcttggctgtaattttatgtatttttctttctcgggattttggggtgtcagttacctttctatcttcagttctctgatggatctaagaaaagttgattttcagtttgttgaatgattttgttgttgtgaagatgggaatgaaggcttccgagctctttatatgccagagctaaaatgagaatattatcattttcatccaactcaaataaccacaaacgttacaagctctaagatgatatttgctgtttcatagttaaagtatcttcacagctagacttggctttattatgttgtttatgatgtctgacataaattggatccaggagagtccagtctagatgtcactgtgtggccttgggtgattgagtgtgactgggagggtgagttagtttctggtgagccagtatctatgatgctgtatcttggtcagctggggctgctataacaaaatatcatagactaagtgacttgactaagagactttatttttcacaattctggaggctgggaagttaaagtgctggcacattcagttcttggtgagggccccgttggcttgcaaatgggttacatcctgctgtgtcctcacatggcctttgcttggtggttgtgtaaacatggagacccctccttcctcttttttaataagtgcactgaccccatcataagggtatcacccttatgacctaatctaaaaccagttacctccccaaagtcccacctcctaacgtcatcacactaggggttagggtttcaccatagtaattttgggaggacatattcagcctataacatgttgtgtcatggtgagactggcaatgctagatttcgtgatttcctaaaaaataaaataaaaataaaaaactaagcacctactatgtgctgttttagtcactgagaatataaccctgaacaggacggaagctgtgtgccttcttggaaccctccttccagcagggagagataaaatggggtggggggaggtgaggggcgtaccgtatatcagagagcagtaactagtaggcatgaaataaaacaggttccacacgcgcaccatcagaaagtcacaagtgtgcaaagcagacaaatcccaatctcctcacttttctatcgcgtaggccccgcccgcgccccaagccccgccctgtcatggttttcctctccagagggtagccgctacgccttaccgactgcgtttcagtgctgtcccactgctcctgcacaccccacgcctgcgaccctacccaccacggacaggcgctcctgcgagctggaagccagttctctgcgtcctgagcctggcagctgcatctgaacactcggagcctggcgatggcttccagaaacccctgcgccgtgggtcgcttcagtgaaggggcctgtacttcggcgacccagactccgggctgagaggcctcctaatccaaccaggaggaccaggagaggcccaaaaggggacacagggcagtgaccgccaggcttggagaggagccgctcctggcaaagccagcgccctatttctgaacgccgcctccgttccggactacacttcccaggggctattgcagcggaggacacgcccacttccggaaaggacccaaagccgggcgagtgcacgtcccgccggttgctgaggagaagggaggtctgggcggggcagcggccgaggctggactggggcgcggcgggggcggtgtcctggttcctgtgtgggcggcgggcgtgagcgtgcgcgtgtggcctggtggctgtgagtgcccatacgtggtgagcgtgcggtgctgtgctgaggaggggcgagcgcgcgcggggatggcggcccggtgtgtgactgtccggtgcgtggccgcgaatctgcgcctgcgtgcatggcccggcggcgtgcggaaggcggtgtgtgttggaatgagtgaagcactttaagtggccaagagcaggaaacccggccggaggaggcttaccccgttctcccctgtatcgactgcgtagagcccagtgtgggcaaagtcctagagcccggggaagttgcccgggcggggcagcctcggctgaagcatttcctgtcagccctatctggaaggggcagagcccaggacagggctccatgtccacaggacggcgaggagcgaagaccatggggactgagtacacaggtaagagtgacagatgacggatgtggctgccggagtggacattgaggttttgggtgctgtctttcggggttcaggtgctggaggaggatgtcccccgtttctaaggctagtggacctggaagtcgaaagatttggagggtcaccttgggtcagagtggagctgggtttagttagggagggaccttgacttggccagagacacctaaccagataacctgactcaggtccttggtatatcactaagggcccatgggagagaacactacccgtaatattacccattatagcattacttctgggtactctgctgctgttgaaggaatagctcagcatttagatttttacccgtcagagccttgtcccatctatcactgtaggatttgggaagaaggcgagattcacagcttcacccagaaatgccgaggcattccagcctttctatggcttaatcacgttctagtcaataacggaagatatccccattccttgggcttctctccctcccctctggcctcccactccaataaagagaaagggggaggaagggctatttttagccatattgttctgtgcttgtttagtttcctgcatgctatagtaatagctaatgtttaatgagtgtttattatgtgccagacacagttctaagaccttttgggagtatcagcaccaaacttcacaacattatgaagtaggaactacttacctcttttttacagatgaagacacagaagcatagagaggataagtaatcactagcaagtggaagaaccgggattcagatccagaacaggctgactccagagtcactggctgtcatgtagtttcctcaactactgcctcaggtaggtttcttagccacttttgacaattaaagaaactgactctgaaagggttaaataactaaatagttcatatgccagaacctccactgagcaggtttggggtttttttcttaaaaagtttatgactctaagttcttaggtaaaatggagatggtaatattatatacctcacagtactgtcataaggattaaatgacctcatacatgtaaagcacttggtatagtccctgccatgtaatgtgttcatttttatcatcattatgataatcctttgagaaggcagtggaatttagatgaaagaaactagaattaattcagatactttatcctcttccttcctaattaaggaaacatggctcagtggagtcaagggactgcttcaacactgtagtttgtcacaaaacaaaatgagatcctaggcctcatgaggattttttcatttggttgtctgcaagtcacatggactctgttgtaacgaaaggaatgcctctctctggaaaagatggaattctccatggaatttgtcttatagaatgttcacaaatcctggccaactgcacagaggacttattttctgttattttctggtatatgagcaaataacttctgtgatagagtcagccagacctaggttggtgactaggttatttacaaatttgtgtgacttgtggaaaagacttgacttcccagagctttcttgtgtaaaatggtgacaatatacccgattctgtttgaagattttggagatttaaagacagtattaatatatgcagcacagacatggtggctcatgcttgtaatcccagcactgtgggaagccaaggcaggaggattgcttgaggccaggaggttgaccagatacctaactccaggaggttgacacctcctggcctcaagcaatatagtgagcaattgggcaatatagtgagacccccatctctatcaaaagtaaaaaaactagctgggcatggtggcacatgcctgtaatcttagctacttaggaggcctaagcaggaggatcccttgagcccagagtttgaagatacagtgagctatgatcacgtcactgtactccaacctgggcaacagagtgagtccctgtcttagaaaaaaaaaatgtacacacacacaggctagtattaataaatctgttgttaatgaattggtggctgatggggagagggggtcaagagatattatgctcatcctgaaaacccagagcagaggggaaccccagctatatatttcaagtctcccaaagagcatcaggactgtggggtgggggagttggagtgaggactgtgagtgaggacagaagaagctgaagggaagaaagcattttcagactttgattattagtgctacttggtttctcactacttctttttctccccagctctacaatcccagagtaaagctcttctccaaatgaagagccaggaagaggtagaggtggcaggaattaaactttgtaaagccatgtccctggtgagttagtattccccctctccccactaaaatagttttgcttttctggatttggtaatacttgttttcttctgaaaatattgtgcttaagagttccaccctgaggcctgtttcctgtttcttccctttctgatatgtgatggggttgtgagtgagggatagactcacacagcccagtgccctctcagaggttccttctctccttcctgctcattgtttatttttcattcaggaaatgacccagtctgagcccttcccttgtgctcagtcttttcataggcatctgacaaagcagaagtacaatcctcagaggaaatttccatgcctggttcctaagtctcagtcctgattctcagagaggttataatctgctggagaaatgaaaaggcagcaaacacttacgcagtgtgagaagtgctgcaagcagagagtagactcacagtggaatacttgggaagggccattaatagcccatatgatgtctttgggtgaattagaaaaaaaagtgccccttcctctctactgatgaagctctgtaacaggccgcacaatatggcaagaggaagtctaccgtattttagctccttcctgcctccttggtgagggatccttgagcaggatatagcctgcaccatcctactcactgctgagggcaggaagggttggggggacttcacagaggaagtgattcctgagttacgccttgaatgaaatggaggaagtgcaggcatatgggattgatggcattctgaacagagtatgcaaaggtttgttctccccatttgaccatggagccgtgaacatcttaaaatgccaaggaatgttttacatcctttcttctttctaggttgaataccataatctgtttagtcagtcccttgttgttccgtaggtaaattgttgacaattatctgctgttaatagagtgttgcagtaattattcttgtagttgaatttttgccctcatctctgattattttctttgactaaattcctagtttttcattccttgtggattaaagtttctcaaactgaccctaccctagaacattttaaattttattatttttatggccaacaatagaagcttcagagctacagttcatgttctgattaagataaactgttaatctagtttcaccagcaaattgcttattgtaagaaagtattgaatttggtttacaaacttagaaaattaaaatttttaaaatggagtagttaagttttctttttgttttttgtcttttttttttttgagatggagtctcactctgttgcccaggccagagtgcagtagtgcaatcttggctcactgcaacctccacctcccaggttcaaatgattcttctgcctcagcctcccaagtagctgggattacaggcctgtgccaccacacctggctaatttttttttttttttttttttaagtagagatggggtttcaccatgttggccaggctagtctcaaactcctgacctcaagtgatctgccagctttggcctcccaaagttctggtattccaggtgtgagccactgtgcctggcaaaaattttttttttataataggcataacaacttatggccagagcatgacaccttttcttaggtataatgccatgaaacatacactaccaaggtaacttgtttcttagcgcatttggacattttaaacaaaagcattcatgtcagttgccagaggaaaatattttaagagtggcagaatttgtcataaaggttaagatggactatgcacactccactctttttcccagtgaaagttgctataaaaccaggacagcatgcctggaacagcaatctgaggtctctgtaaagtaaatagtagcaggcagactggacacagtgactcacacctgtgatcccagcactttgggaggctgaggcgggtggattacctgaggccaggagttcaagaccagcctggccaacatggtgaaaccctgtctctacaaaaaaaaaaaaaaaaaaaaaaaaaaaaaaaatatatatatatatatataaattagccaggtgtggtggtgcatgcctgtaatcccagctattcaagaggctgaggcatgagaatcacttgaacctgggaggtggaggttgccgtgagccaagattgtaccactgcactccagtctgggcaacagaacaagaccctgtctcaaaaaaaaaaaaaaaaaaagtagcagtcagattggggaaaaagccccagatttgaagtaccaccagaccatggtgcgtttaccttcaagagactcaaaacctgcaagtgggtaatgatgtggacagaaagagctgcaggagaagccttctagttgataatcaaactgctgaaaactaaagacaaaaaaatctcaaaaaccagccactgaaaaacgatgaagaactgtcaacctagaatactatgtccagggaaagtagcccttaggaatgcagataaaataaagttactcataggaaagaaaactaagaacattcactgccagaattctgcaagaatcactaaagggagttcttcagatagaaattataccagaagggaacttggagcatcagggtgaaggaagtgcaacagaaatgggaaatattatatgtaaatacaatagactgttctcttgagtttataaaaatatcttcaatggttaaaaacaaagctgatagcttaactaaacagaacagtattttaatataggtaatctagattcagagaccatgtctaaactattgtagcatactacagttaggtaaaataagatgtaagaattatgattgaaatactaaatgaaatgtttcacctgttcttcttggccttctcttcttctctctctgttttttcccttctgtccttcttcatccttatcataggcaacaattcttaagcaattacatcatgccaggcattttagatctgtttcttcatttaattttcacggtgctgccatgaagcaagtactatatttccatttttcagatgggaaaactgaggcacagggaagttaaatttggccaacctcacccagctagtcagtactacagaccaaattcattggagtaatctgaccttttttctgatttattcaaaactggtatttatttaaaagtctgatgttgatataagtgaagtcataaaaaaattgaaaatctcccagtaacagtccagtggatcactttgtgggttggttaggaaatggagctcatgtaacaaaacacaggttgcttgatatgtgctcacatcacattatttctcctgataatttcccattagattatcaaaaaacaacttttgggcatgttggctcaggcctataatcccaactctttgggaggctgaggtgggaggattgtgagaggccaggagtttgagatcagcctgggcaatatagtaagaccctgtctctacaaaatgaagaagtaaataaaaaaggaaaatgaaaaacaacttttcaaatgtgttcttctctcctaatacaaatatacttttatttcagaagaaaagactatagctaggtgtttttttcctttcattttttaggcatacctcttaacatctcaagaacactaagatttcttagaaaatattgtggagattgaaatcatgttcatcaggtcagcatccttccttgcaagtttttctcacagttccagagctctttagcttctccatgtagagaagtgatttagctcctaacatgaatagcattgcgttagcacttgattatatcctgttttgaatgtagtcagcattttttcattggtaatgtattctcgccacctagaattgcaaatgtttgaagagcaaggagtatctcatttttttctttttcctaatatgtacagcataactaggcagaaaagttgtccaataacttacctgacccggatcatttagacccttagtgcagttacttatacatagtgtttttaatcccaaagtgagaacagcataactctttaccctagagctgcattggaatgtgaacactgagtgagcaagatcatatttgtgtcattttagggttcagtgactttcacagatgtggccatagacttttcccaagatgaatgggagtggctgaatcttgctcagagaagtttgtacaagaaggtgatgttagaaaactacaggaacctagtttcagtgggtaagagtatcttcctcctgttgcctccccatgactcagtagtcttttatgccattatcagaatttcccatagttttccacagcataggcaatttttatatgtctttttacatgcaggtctttgcatttctaaaccagatgtgatctccttactggagcaagagaaagacccttgggtgataaaaggagggatgaacagaggcctgtgcccaggtaagtggaggatacctagagataaaggaactgttctcaacatgttcttgtctctgaagtgtgttggaaaacacctctcaaactccctcccaaactgaaacttgttcttctaacaccagtttttgaatggttattctcttccctactagtgtaacttgcctcctttacctttattgatttcttatgcataccagggtctatttctgagctcttgttttactgatgtttacctaattctactcaagcaccatattgttgtcatcatccctgacttcaaacatttctgaatcctttagacaagctgatgtttagttttttgaactggtttaaatattttcctttccttaaaaggtgagtttattgagttaacatgtattacagctattttcttccctctgcctttttcttttttgtatttcttgtgttatttattcttgttttgttgtttattaggtctgtttttttctcactctcttctttataccaccccaccctttgaattagaaaagtttttagttctacaagttgttacctttatgtatttatatattttaagatcttttagaatttttctgcttggtattccaaacattgtcttctgatacccttacaaaagatgaagaaattagctcatgaatattactttctttccctgtgtacatcatttccccacttatattgtgctcactgggatttttgacgcagggtatttcattcaattttttttttttttttttaattttcttgccttgctttgtagctgttttactgatttagaaagctagataagagacgacagaaatatattgcaagaaaatgaacctcaaatgagatggtcctggtttaatctgtggcctgaagcgtagacttttcctactttcagttcttcattttattttattttattttactttttaaaattagagacaggatcttgctatgttacccaggctggagttgaacttttgggctcaagcaatactcccaccacagcttcttgagtagctaggactacaggaatgcatcaccacacctggccctactttcagttcttatagtttcaacaagaggattgtgggttacttgtggtcctatgtacattaataaataagaaataatgaaaatcagtaagcatctgattcacaatattagaaaaagaacaaaatgaatttaaggaaagcccagataagttatatgtagtgatttatacgtctacaaataaaagtaggaataaatgaattagaaacagtagcgctactgaaaataaagtattgtacatacttcattagaaaaccaacacagtatataaactaaggacaaatgagagaaaacacaaaaacaaaataattataaataaccacacatgcataagaacttaaaagaatcatgtgaatctattttcctcaactctccataaaataatttgaaaaaatagatgatattctagaagaatataataatgtaggttaccataactgataccaagaggagatacaacatttaaacaagtaagttaccatcagagaaatgtagaatgttgtataggaactgcctcccccaagaaaagaagccacatccccgaatagttctttaaggaaaaatatcatcaatgttgtttaaattgttctgggatagagaataaaaagagagcttaaaacatttttgtttatgaatacagcatatccgatgataccaaaattaccaaaatagcaccaaaaagagaaattagagacaaacctcaattatcaatattggttcaaaatcttaaaaggtcatattgaaatagtataccatggccaaggaggatttattacagcagtgcaaggatggttgtatcacctaatcttatgtaagaaccataaaaacatgtacctctgcttgtgggtttcaataactatgtgattcacattttcattttcgaaatttccattattctagcatttaataaaggagacatttactttcttaatatctttcagacttggagtgtgtgtgggtgaccaaatcattatctttaaaccaggatatttatgaagaaaaattacccccggcaatcataatggaaagacttaaaagctatgaccttgaatgttcaacattagggaaaaactggaaatgtgaagacttgtttgagagggagcttgtaaaccagaagacacattttaggcaagagaccatcactcatatagatactcttattgaaaaaagagatcactctaacaaatctgggacagtttttcatctgaatacattatcttatataaaacagatttttcccatggaagagagaatatttaattttcatacagataagaaaagcttaaaaacacattcagttgtgaaaaaacacaagcaagaccgtggagaaaagaaacttttaaaatgtaatgactgtgagaaaatattcagcaaaatctcaacccttactcttcaccaaagaattcatacaggagagaaaccctatgaatgtattgaatgtggaaaggcctttagccagagtgcccaccttgctcaacatcagagaatacacacaggagaaaaaccttttgaatgtactgaatgtgggaaagccttcagccagaatgctcatcttgttcaacaccagagagttcatactggagagaaaccttatcagtgtaagcagtgtaataaagcattcagccagcttgcacaccttgctcaacatcagagggtccacactggagagaaaccctatgaatgtattgaatgtgggaaggcttttagtgattgctcatccctagctcatcatcgaaggattcacactgggaaaagaccttatgaatgtattgactgtgggaaagctttcaggcagaatgcttctcttatacgtcatcggcgatattatcatactggagagaaaccctttgactgtattgattgtgggaaggctttcactgatcacataggacttattcagcataagagaactcatactggagagagaccttacaaatgtaatgtgtgtgggaaggcttttagccatggctcatctctgacagtacatcagagaattcatacaggagagaaaccttatgaatgcaatatctgtgagaaagccttcagccatcgtgggtctcttactcttcatcagagagttcatactggagagaaaccctatgaatgtaaagaatgtgggaaagctttccggcagagcacgcatctggctcatcatcagagaattcatactggagagaaaccttatgaatgtaaggaatgcagcaaaaccttcagccagaatgcacacctcgcgcaacatcagaaaatacacactggggagaaaccttatgaatgtaaggaatgtggtaaggccttcagtcagattgcacaccttgttcagcaccagagagttcatactggtgagaagccttacgaatgtattgaatgtgggaaggcctttagtgatggctcatatcttgttcaacatcagagactccacagtggcaaaagaccgtatgaatgtcttgaatgtgggaaggcattcaggcagagggcatccttgatttgtcatcagagatgtcatactggtgagaaaccttatgaatgtaatgtttgtgggaaagcctttagccatcgtaaatcccttactctgcatcagagaattcatacaggagagaaaccttatgagtgtaaggaatgtagcaaagccttcagccaggttgcccatcttactctacataagagaattcatactggagaaaggccctatgagtgtaaagaatgtggaaaagccttcaggcagagtgtacatcttgctcatcatcagcgaattcataccggagagtcatcagttattctctcctctgccctcccataccaccaagtcctatagattcaatctcgtaaatgcttctagcatccatctgcttttttccagcacatgtcccatcatcatagtccaagacgcaaccatctcatctggatttctgcagtagcataactgttgccccttttgcttctatcaactacatgtttaacactgtaggcagcctaaccttttaaaaataaaaatacataatttatgttattttcccatttaaaacacttgatttgaaaaatatattaactaatccatttcaaggatttagcacacactggcatatagttattgctaaataaatgctagccattaaggtaaaggtttccttacaaactatcatattaagcagcaagtaaaccaaacagtaagtctaagactaagattttagagcagacagaagactactctcctggtagagaggaaagatgaacaaactcagaattgaaagatttatggtacacaaggtaacatggtggcttatcactccctctgtgacattgttgatgagcaactctcactttacctgacactgagaagtgagaatcagccaattagaacaaaagcttttagctgggtgcggtggctcatgcctgtagtcccagcactttgggaggctgaggcaggcagattgcttgagctcaggagttcgagaccaacctgagcaacatggtgaaaccctgtctctacaaaaaatacagaaattagccaggcgtggtggtgcacacctgtagtcctagctactcaggaggctgaagcaggaggattgcttgagcccaggaggtagaggttgcagtgagtcatgatcacaccactgcaattccagctgggcagcagagccagacactgtctcaaggaaaaacaaagaacaaaagcatttggtagaatgtaggactaaccagggtaggtagtagtaaaccaaaagtaacaagccaaaaaaacttgaatagattaatagccatgaaacactgaaaagggtagttcaatactttggcctttataaaagtaccacagacaattcgtgtggtatttaaattgttctagcataaaataaaatgcaataagaccttccatcttgttccatgagattgacaagacatgccaaaacataaaaatatgtacactgcaattagtttctgaatgtagatgttacaacttaaacttatttttaaaatatttaaaaataggaaggctagacatgcctctgtatagaaaatctgataaaaatatttctccctaaattgtaaattcattgatattccagtaaaaatttccatatttttttagttgagaagctgattctgatcatctgtagaattttgattttaacgaggaatgtagtttacattaggaatgtagtactaatactaattgaacatttgctaatgtttcacacactattttaggtgctgggggatacagtaaggtacaagatggacaaaaatacgtgctcttacagatctagtagaacagaaaaaattaaatgcatgctatgtgataagtatatgatatgtcccataaagagaaatgatataaaaaagaagctagggagtgctggatcaggcaccttactatccccagaacatgttggtattagaggatgagggaagaactagaggtaactgtgagacacaaaaggcataatgaaaatagtcatgatagtcccaaggcagatattgtttatgatgctttgagtgttggaggaagggaggattgatggtttaacagagatcatggcagttatgttcactcatataaatgttgatttagaagctggtggaagggtattttttgagtgacagctttattgagacaaagcaattctggagaacacccatatccttctctctgtatccatcagcagaagtgaagagggagccccaaagttccacttaaagtgtacaacttatggcttttagttcattcacggagttgtgcaaccatcaccaccatcaattttagaacattttcatcacctcaaagaggaatcccttgtccttttgtagttatggccatccctggaagagtacttttttttttttttcaactgaagcacccagagctcttgggttccctcttaactgctttctgtggaagtatagagggccatgtgagggaagccgttatccagagtacatgactgctagaaaatggagtttggggctccctcttcacttctgctgatagaagcataatggctaggggatgggtagtctcaccagagaatgtggagctttcagactctccttatatatgataaaaaggatttttcattgtagtggggaaaaggtggtttgatcaaatggcattgggaaacttagctcactggaaaaacagatctgtacctttcacactaatgaaatgcctgagatattaaaggtctaaatgtaaaattaaagtacatgaaaaacagaataatatatatgtaccctcggtttgaaatagactttaagcactaatgcataaccccaaagctgacattaggcttttatatggtggaaaacatcatagtcaatagataaatgagagactgacacaaagtgtttgcaacagatataataaaggactgtaattcgtgatattcaaagtactattacaaaccaataataatctgcaacttagaaaaatggactaatgtcccattcacaaaagatgcaataaaagcagttaatgaaaattatccaatatcactagaaatcaagaaatgcaaattaaagtgattatctactttttccccaaaagactgactaatcgagtgataacattcagtattggtgaatgtgtggaaacaagggaattccattgttgattacatatctattgctttatgtatataccctttgaattaatattccttggaaaccaacatatacaaaggtagataaatgtattagtggcaaaaaaattaatggtaaactattaaaacaacaagtgtccatcagggtaataaataaattaattatggtatatatccattcaataggaattatgcagctgttgaaaaaaaatcaatgtgtgtagtcatagaaagatagctgtgctatactaaatgaaaaattgcagacctgtattgtagtataggcccataattgtgatatcaaaaataaaaatcaaaatatatattatagtaggcatttgtttttctctgcccagtttcccttgcctcctccttttggctgcactatctcatcttttccttttgagtaactggccataccctaccatatgtttttgatggacgtggccaataaaattgtctctgaatttcaaaaggcatttggatctgtgtcatccaatggcaactccctaaaagctgatgcagttattcttttgattggtccttggaaccaccctggtttttgtactttccaagtctgtgattcctcaaactacccattgtctttccggtacttgatttttgcctcctgttggtcagttgcttgcaagtaaagaaacaatcatacagaatttggtacgaagattgggtaatgggcattagaatctttggaaaaatcaggtattgggagttgctttttggatgagatggggcgaataagacttatattctagactggaaagcatctcatggtgtgcgatgagcaaacgcctgattattcattatagtcacctgggatgaatagaggtctagggttctggataatgataatttaaggaggatggagaatgctgaatccaaaaggtatatgtaatactggtatctaactgcttggaataacttaaagtttagctcttgaatttctagcattaaggcaaaaaaaattcacctaagggattttgtatgatattgttgaaagatgtcttacattgtttaaagtcatagggttaagatggctcataaccaaatttagagactatttttatgcattgttaaagtggaatgctggttaaattttatactttattcacaagagtcactgtgaattgaattgtgaattcagttctgaattgtgttcccaccagcaccaccaaatgctggcctctaccaccaccaaatttacttgttgaagtcctaaaccccaacatgactgtatttggacataaggcctttaagaaactaaggttaagttaggccataagagtgaggccctaatcccataggactagtgtccttataagaggaagagacaccagaggtttgtctctccacatgtgcacagaggaaatgctgtgtaaggacacaacaagaatgctgccatctgcaagccaggaggagagacctcaccaggaaccagccctgccagcaccttgatcttggacttttaatctccaggactgtgagaaaataaatgttggttgtttaagccacccagtctgtggtatattgttacggcagcctgaactgattaatgcaattaccatataatttattgttcaaactgggacatttttgagagtgaaaggagtagctaactgcacagggcacttgacaacaggtgttcatatcctcagcaaagcaggatatatggtcatacttcttgtgtaacagaatattgaacagaaaaaaatatagctctactattggaaaggtgatattggagatgagccaaaggattggaatatactgaacttccggattcgtgtgatataccacctattaacatctgtttgcataggtacatatggctgttctgaagagacagctaacagttcatcttattcccccattccattgttgctcacatggaataacaaagtgaatttaacatgaccataacattaaatgcaaaaatcaggctgagcacagtggctcatgcctgtaatcctagcactttgggaggcccaggcaggaggatcatttgagaccagcctgggcaatgtagcatgaccctatcccatatctaaaaaaaaattaaattttccagtcatggtggcacctagctactcgggaggctgaggtgggaggattgcttgagcccaggagttcgaggctgcagtgagccatgatcacaccattgcaatccagcttgggtgacaaagccagaccctgtttgaaaaatagataaataaaatcatacatatgtacaaaattaaaatagggcaaagagtaactgtatcttagaagaattttcggcagttagtttactagtgtagattaagaaaaatctagggcatttgtggaagtgaaatttgaggaggctgaatatattgacaaagtagcttgagtagcctgccatggttctaagaatttgttgaactcatccatgtaccaaatgctggccgctaataaattacattataaggccagaaatctcttaacataatgtaaaggatgttgttcagacttcaaaaggcaggattgctggattggttcttgtgttgcaacatcaggtctcctgacaagagtccagaaacctatacattcattcttcccgtgagaaaaacaccatttgtctaatggattttaaaaccattacaccgactctctggcagatcaagaatgctatgtagagaggttgtaactgaaggagcatctctgatcaaaagactaattgaaatgggaatgacaccaaactgccccaccaggtgagcctcctctgggactaatgtgacttcagagagagcctttaactcagcatggcctgagagtccttgggcagattggggccttggggaggttttttggggctcctggtggcagaagcaaagaacaatttaaaaataaggtttaaaaaattctacctacaatagcatcaaaaggaattaaatacttaggaatcaacaaaagtacaaaagttagattctgaaaactataaaatattgttgaaagaaaatcccatatttatgcattggaaggcttaatattattaagatggcaatgcttcccaacattatctacatgttcaatgcaatctaatttcctttttgtgggaattgataagctgatcctaaaattcatatggaagcacaagggactcagaatagccaaaacaatatttaaaaagcaaaacaaagctggagagtcacactttccaattttaaatcaaaactgtagtaaccaagactatgcagtactggcataaggatagttatagagatcaatggaatagaaattaaggtccagaaataaacccatacatttatgctcaattgattttcaacaaggatgtcaaaacaatttaatgtgggataagaagagttgtttcagccgggcgcggtgactcacgcctgtgatcctagaactttgggaggctgaggcaggtggattgcctgagctcaggagtttgagaccagcctggagaatatggtgaaacccagtctctactaaaaatgcaaaaaattagccggctgtggtggcgtgcacctgtaatcccagctactcgggaggctgagacaggagaattgcttgaactcgggaggcagaggttgcagtgagccgagatcgcgccattgcactccagcctgggtgacagagtgagactctgtctcaaaaaaaaaaaaaaaggaaagtcatttcaacaaataatggtgggatcactggatatctacttgcaaaagaatgaatttggggctgggcgcagtggctcacgcctgtaatcccagcactttgagaggccgtggcgggcggatcatgaggtcagattgagaccatcctggctaacacggtgaaattccgtctctactaaaaatacaaaaaattggccgggtgtagtggtgcgtgcctgtaataccagctactcgggaggctgaggcaggagaatggcatgaacctgggaggcagagcttgcagtgagccaagattgtgccgctgcattccagcctgggcgacagagcaagactgtctcaaaaaaaaaaaaaaaaaaaagaaagattgaatttggacccctacctcacactatatatgaaaatgaatgcaaatagatcaaatatctaaatgcaataaccgaaatcgtaaaactcttagaagaaacatagtggtatatattcatgaccttggatttggaaatagtttcatagatataactgtcaaagtacaagcaacaaaagcaaaacaagttggactattatcagaattaaaaacatctatgcttcaaggctgggcatggtacctcatgcctgtaatcccaggaatttgggaggctaaggtgagaggatcacttgaggaaaagtttgagactagcctgggcaacatagtgagatctagtctctacaaaaaaaaaaaaattaatagatgagttggtgcatgcctgtaatcccagctactcgagaggctgaggtgagaagattgcttgagcctgggagatcaaggcttcagtgagctgtgatcgcaccaccacacatcagcccaggtgacagagcaagacactgtcttaaaaacaaaaaaacaaaaaaatctatgcttcagaagacaccatcgagaaagtgaaacaattcacaaaatgagagaagatatttgcaaatcatttatctgtaaaggacatgaatccagaattacaacttaacaataacaagacaaataacccaattaaaaataggcaaaaggtttgaatagacatttatccaaagaaaatatatgaatgaaaaacaagtatatgaaaagatgctcaacatcactcgccattagggaaatgtgtatcaaaaccacgatgatctgccccctgaaagggccagacaggggaaggaatgctgcggtggggttttgtcatcctgaggatggataggtgacagagccttcccaatgttctcactctccaatgacagctggaaatgcagtgttttgttttgtgaaaatgaaggcagatgagtcatgagaagaatgggctaaaaatcctgtaacgtgtgcgcacatatttattccatctttattttgttctaacaaaacaccttgtataaaggaaccagccacgtattcctttgttcccactgaaagagttttttctttattaaaaagaagtgcacacatattgatctactttaagcacacacacatcgatctttacattcaatgtaattcaaaaaaaatcaaagtaagatttttaattgacgattgtagactgattctgttaccacaactggactgggagttctttggctctcatgtaagtagaaattaacatcatgccaaacagaaattttctcaggcaaggtttaagaggcttgaagctcaagctatgcaaagtcacttccacatttttcggtatcttttcagcagcaccccactctactggtaccaatttactgtattagtctgttttcatgctgctgataaaggcatacccaagactggggagaaaaagaggtttaattagatttacagtaccacatggctgaggagacctcagaatcatggtgggaggtgaaaggcacttcttacatggtggcggcaagagaaaatgtgaaagaagcaaaagcggaacccccgataaacccatcagttcttgtgagacttattcactatcacgagaatagcatgggaaagaccatgccccatgattcagttacctccctctgggtccttcccacaacacgtgggaatcctgggaggtacaattcaagttgagctttggttggggacacagccaaaccatatcactatcctttgggaaacataaagttaggttgccaactttatagcacttcccagtttaaattgtaggaggacaagttcccttttttttttttttgagatggagtctcgctctgtcacccaggctggagtgcagtggcgcgatctcagctcactgcaagccccacctcccgggttcatgccattctcctgcctcagccttccgagtagctgggactacaggcgcccaccaccatgcccggctaattttttgtatttttagtagagatggggtttcactgtgtaagccaggatggtctcgatctccttgccttatgatccacccacctcgccctcccaaagtgctgggattacaggcgtgagccaccaggcctggccgacaagttcccatttcttactaaagagaagtcttggcaataactgaacaatgtctctggcagtttaccccagaaggacaaactttgacttttacaggaagctggccaggagtgacataggagccatctgttaagttgaaggaattgacatttctagatcacggtggaaaaactcccaccacccacccaatgtggccttcacactgacatgtttgttgtgttccttgtatccaaggagcctggaactcagaatgcatgtacctcatggaacattaaggaacagtcttcataagggcataagggctgctgtccttgtgactaagcactattaatacagtgcccaaacagggacagtctgagttacacgcaatttagagtcactcaaattgatccctcagtttttgattaatagcatattggtgttttaaataaagtattttcagaagagtacaaagggctttaattaaatctgagtaattttaaaggaaatatatgatcaaaaaagaggaaaaatgtgcctcaaaatagacataaatggcttaaatgaatgctaaaactgaaaatcaaaataatttagaatgcacatactaatttggaaacaggtaaaacagacataagagttttatttgtagggggagggtctgtaaagttaattatgtgaacttctgcgttgtaactatgtatttttacaatctactctttgactatttccttctttggggaacaatgatttagatatcctgaaaatgccacatcagtaagttgaacaagaagaacgggagctttaagaacaagattcaagatgaaacaacacaagtgttgaatattttataaatagctaaaggcagaaaacgttgccaattatctcagacttccagaaagtgaaaacaaacaaacaaacaaactaaagtcttaattgaaaagaagaaagaaagacatgaagaaagaaatagagaatgcatgttgagagtggggacaggtaagtaccagctggactcttaccctgggctgttggtcctgaggatgcggtataggttcagcctaggcactggctccaccccttgaaatagtttggatatttgtccctgcccaaaatctcatgttagattgtaatccccagtgctggagatggggcctggtgggaggtgtttggatcatggggcaggtccctcatggcacggtgctgtcttctcgataatgagtgagttcttgtgagattaggtcctttaaaaatgtgtggcacatttcgccccttctgtcttgctcatgtgtttttgccatgtgatgtgcggctcccctttcaccttttgccatgattgtaagcctcctgtggcctccccagaagtcaagcaaatgccaatgtcatgtttgctgtacagcctgcagaactgtgagccaattaaacctcttttccttataaattaccaggtatttctttacagtaatgcaagaatggcctaatacactcctcaaggacctcatctctgagagatcacacagttcttaaatcagaggggcagttcgttgctgaatccaggaagacaggccccaggtccaggttctggaatgagtcctggaggcagtaaagggtctgcttgcctggtggggaatattcagagggcatcactgaggagggggcccactctctgagcaggtgaggaccagcagccagagctcccaccagcccacaggggcaaggagggaggccaccttgggcaaaggagatgaaggaaaaggaggtgagggtgctgaatgaaggctgcggtcctgtcctctgcctcacccccaaaacccagaggtcagcctccagcccctcacactccacagagaggccttgggaggcttgatggaaacccactgagtactgagctccaggtcccaggagagcttatagccacccccaagtcaccaccacctgctgctctggtaggggccctggcttctgcctccaggaacccctaacaagcctcctcaaggcccccaacaacctgcgcaaggactctcgggaaatgctgagttaaaggctctctgaggtcacactagtcccagaggaggctcacctgtcaggggaggttggtgccatggtctggaggctctgggttgaggatgagcattggagttgtggggcccagggaggccaggcaagcccccattcaggaggaggtagagactgaacccccctcacagacccaggaaacaaagaccaccatccttgggtgtccaagttccgggatctctggatcacggacattcagctgctggctcagaggcgggaggagagaggggcagagaccagaactcagagaggacttcaggggatcccccaagactgcccccttttcaaatctgagcctgctcctgcccgctcactgggagaggtgagagggtcccattccagctcagctcgtggagtgagaggcccacactccatcccttgtgccctccctagaaccaattccgtacctggcacatgcactgacagcccgttaattcagtcacatcatctgacagtaggtcctctctttacctgaacgtagcacctccctgtatcccccatctaggcatctctgatgctcagggagcagttataggtttgggggtgccccaggaaggcaaatgggctctgggtctcctcctacattttgtggggagggtcattgtggccactggatcattcaaattaaaaacgtggactcggcacccctgagctggaaaaacgtcagacaggacattctgggggaggttagaggcacagggcatcaggacacacaggccctcctgcacctacactgaattccttcactcacagctggaatcgtggatcctgagccaggcactctggaagaaacatctggggaggaatagctgtggttggttccaaaggaccaacaacctggggccccaacaacccctcccttctgaacctcccttgggatcactcacactccctgcatccccacacacacataaagcagaggccacagcagcagctcagtggcatctctatgctggagaaccaggcccacccccataccatccagttcctcttttggggaagaaagaggaaaagccccactggaagccactgggaagggtcaggatggcgattgaacccagaagggaaacttcagatacacagtccttggaaatcaaagaagatctaaataaattgagagagattccatgttcatgggtaggatgacttggtattgttcagatgtcagtgcttcctaactaatctatagactcaaccaatcccaatcaaaatcccagcaagttattctgtggatattgagaaagtgattataaagtttatatgaaaagacaaacatgctcagaatagccaacacaatactagagaagaacagagttggagagcggatactactcgacttcaagacagagctattgtaatcaagacagtgtagtgttgcctaaagaatagagaaggagcaatggaccagaatagagatcccagaaatagaaccacatgaatatagtcagctgatctttgtcaaagaagcaaaggcaacttaatggggaaagaacagtcttttcaacaaacagtgctggaacaatgggatgtccacatggaaaaaacagacacatttttcacaaaattaacttaaaatggatcatagatttaaatgtaaaaatgcaaaattataaaactcctagaaagtaacaggagaaaatctaggtgacctttggtttagcaatgagtttttaaatacaagattgaaaagcacaatccaaaataatttaaaaaaagaaaaaaaaagcacaatacatgaaagaaaaaaatttataagttgttcattaaaattaaaaactactctgtgggccgggtgcagtggctcacacctgtagtcccagaactttgggaggctggaggcgggtggattacctgaggccaggagttcgagaccagcctggccaacatggtgaaaccctatctctactaaaaatacaaaaaattagccaggtgtggtagcaggtgcctgtaatcccagctactcgggaggctgaggtgaaagaatcgcttgaacccgggaggtggaggttgcagtgagttgagatcgtgccactgcacttcagcctgagcgacagagggagactctgtctcaaaacacaacaaaacaaaaaacaaacaaaaacttctctgtgaaaaaatactgttagacttaaaagacaaaccaccattgggaggacatgttttcaaaacacatagctgctaaaggacttacatacaaaatatacaaagatctcataaaactcaacaataagaaagcaatgcacttgaaaaatgggcaaaagatctaacaaaaactgcaaagaggatatacagatggtaaataagcatggaaaaagatgcttaccatcatattaccatcatatgtcattagggaattgcaaattaaagcaacaagatatgactacacacttattagaatgactaaaatccaaaaagaactttcaatatcaaatggtggcaagattgtggacagcagttctcattcattgctgtgggtatgcactttggaaaacagtttggtgatttcttacaaagctaaacatacccttgccatatgatctagcaatcacactcctgggtatctggctaggatttggaaaaactgctctcataaattgatgccaggaatgtaaaatggtacagccactctggaaaacagtttgacagtttgttaagaagaaaactaaacatactatatgacctagtaattacattactgagcatttatcccagagaaatgaagagttatgttcacacaaaatcctgtaataagaaaacaattaccagtgggaagaggcagcttactaattgggaggaaatatttgcaaaccatatatctgataaggggttaatattcaaaatatataaggaactccttcagctcaattacactaaaaaacaaattacccgatttaaaaatgggcaaatgacttaagtagacattttcccaaagaagacatatagatagccaacaagtatatgaaatgatgctcaaacatcactgattatcagggaaatgcaaatcaaaaccacagcaagatattacttcatcccagttacaatggctattctcaaaaaaaaacaaacaaacataacgtgttaggctgtggagaaattggaacccttgtttactgttggtgggaatgcaaagtagtggtgcttcttggaaaacagtttggagattcctcaagaaattagaagtagaactaccatatattcctgcaatccccatctgggtatatggccaaggaattgaaactaggatctcaaggagatctccaggaggttgcaatgaataatgcacttccatgttcattacagcattatttacaatagccaagagatgaagacaatgtacatgtccattgacagatggacagataaaaaaagtgacacacacagacacatacacacacaatggcatatttttaagccctagaaaaagaaatcctgtcatatgcgacaacatggataaactttgagtacattatgctaagtaaaagaagccagtcacaggacaaatactttatgattccacttacatgtggaatctaaaatagtcaacctcatagaaacagaaattagaatggtggtttccaggggctgggggaggtgagaagacgttactcaacgagtataaagtttctgttatgcaagataattaagttctctctatacagcaacttgaatatatctccagagaattgtgctgaatgaaaaaagccaattccaccattcacatactgtatgattccatttgtataacattcttgaaatgacacaattgtatatatggaggatagactaatgatcgagtctggaggaaagtgagtgtggctataaaagggcaagatgaaggatccttgtggaaatatcggaagagatccttgtgatggaaatgttctgtctcttgaatggaccgacgtcagtatcctacttgtgatattgcaagatgttgcccttgggtgaaattacctaagagacataggtctctctgtatgatttctatattatgttttacaacctgacgtgaataaatccacatttatctcagaataaaatatttcatttaaatacatcattaatcaccacctaaggctagctgctgttgatggttttgtggccacttggacattcagcaaatgtttttaaacttggctttgtggtttactatagaaaagggtctcagccaggcatctggttcctacctttcctcttgtgtaagctcccctgtctgtattacccaactaatctggaaagtagcttggctgtgaagattgtttataaatcataaaatgtggagaccaggggtcagaacaaaggaaactcacaacaaggattaatgctttttttcttatatctaaagatatagggaattgacatttaaagatctagttgttttttatttgcaattctagaatccagccacacctccttctataaaatagaactagtgttctggtgatccaagcagaggaatatggcttcatacacagaaacgggctgaggaaagcagaaacagagaacaagagtggatgggtcatttcaaagttactttccctatcatggttaaagcaaaggggatttcttttatcatgcctgctaaactggcctgtttgggacttggctattatctctctctttctctcctgagaggaggtcaggtaacaacttagttggagttggtggcctggaacttcagcatgagtagctccatttcgatttgatctgttgggcctagtgcaggaactcagtccaaaccgatagtctcctatacattttattctacacctatgctcattttcttctttgcacatctgtatgcttaaaaagtgttctttaaagataagcatgattatcaggtttaaagttgcctgggatggtccctcaggccagtccattggctggactgcagaaatgtctgcagcagatgtgacacgcctcttttatccccctcatttctctgcctccacccatcccttgtccttttctgttttccttcctccctcctccctctccttacccattctttcctctcttcagcctgtcctgccctccccaactcgacttcctctttctttcctccttttcccacccttttcttcttccttatagtcctttccaccttctcatccccctttccaccctttcttccttctcctccttgccgtctccattctcttcctttcctgcctccctgcccctccctcctcccacccgctccctcttctttctgttggttcctctcctctctgacctgttcttttcccttagtctctccccagcccttcctccttcccctccatccttcttccaacccctcctccttctccatctcttcttcttcctccccagctctcctccccaagtccctctccatcctctctcttctccccgctcctccccatccctcctccccttccatccttcttcccacctctcctacttcttttctccctcctccccccttccctcctgtccctcctcctcgcccctcctttccctccgtctttctttccacccttcctccctccgtctcttctctctccttccctttccctgcctcctccccctcaatcctccctctcgccccagcctccttggccgcggagtcctctgtgagatggaggagctcagttggctccgctcggctccactcggctgggctcggctgaaaaaagccggggggaggtggcgcgcgcgggtttctgggaagcgtagtccggcgcagtccgcgcaggcgcactgccgtcgggcgggcctagcgggcgcggtcattgtcctggcagagcggcgagccggtgagtgtggctgcggggtcgcgcccaccctctacctgtgccgggggccggaacctggccccggggagggcgcggcctcggggagacggcgtgcaggcccaggtacggggagtgcagggctgggtgctggtccagggcgtgcgggcgcaggagagggcgtgcaggccgggaccgaggtgcgcctggagaggctgagcggccgaggagaggctgaggggaagctgaggggctaaggagaggctgactggaggctgaggggctgaggagaggccggggccagggagggagaggcgtgagtgggttggaggtaggaaagttgcatgaacacgagggccatcctggggggaaggtggcctgtgtgagagacaggcagtgcatatcatcctgaggatgaggctgtgtctttgtggatattgtgaatgtgtctgtgtgtgtgtctgtgtgggtctgtatgtgtgtgtgagacagattgtgtcgtcctgagggtatggctgtgtctctggatattgtgattgtgtgtgtgtgtttgtgtgtgtgtgtgtgtgtgtgtgtgtgtgtgtgtatgagacagagagagaaactgcgtgtcgtccagaggctgggtctgtgaatgaatgtgaatgtgtccatgtatgtccgtgtgggtcatgtgtggtagcgtgtgtgtgtgtgtgtcccacttcttcagagtcttggtctctctgtggagctgtgtctctccaggtctctgcctatgcatgtgtggtgatatctctgagtgactgcctgtgtccttgtctttggtgttgtgggtgtgtcagccttgatctctgtccatgagtgtctctgtgggagggtgccctctgggtgtccactatgtctgctctttccatgcatgtctcttggcatgagtgtagggctgtgtctttccaggggccagtcctgtctggatctttcctatctctgtgtgtccacctgtgtctagagtatttcttgatgtttgcgtgtgactctgcaggggtgggtgcgtctgggtgtgcctcttccaaagactatatgcctggacaagggagcctagcagagccactaccttctcaccctacgcttctcctagtctgcctgcccacagttccctggctttttcctgcccatagaaggctctggaggcgtaggggcctgggagtgacaggggccgggtggaggaggggaaaaggaaggctgtttcttctgcctcccacaggatcttcttaaagtgggatcagactcccaaagggtctctgtgccctactctgttctgaccaaggagaggttgatttgttcagggaatgtgtatgcagccagtgctggccatttatagatgtcccagtaactctgaggtagagaccatcatcatccttatcttacagatggggaaactgagtctcagactaagtgactcacccaaggctacctcaggcatccaggttccagagcccccacaattaaccaccagacaaatgggagatcccttttttccctttccgctcagctgacacaaggttgcaggattttccccgagggaatccccgcttggaaacaatggaaatggaagaaaggaaggaaatgccaaaaagctcagaggaagaagaatccagatctaaggccaaactgggttcaacagccactggccatactcttgggcaagtcacttccagggccgctgcatgatttttaagggtactttgccttcatgggccccttgctccattgtttttttaaagcactaaaaattacattttgttatttcattaataggaagacaaatgtaatctaggctggattagatattttcttatgattttaaaagaaattaagaccttcctatgggcccctaaaggtttcatgggccccatgctctgtgcctactgggtaagtgggctctggtcactgctgtgatctggcaaaatgggccagtgttcttgacctcacaggacaggggtgaaagagaccactatctgcaaggaatttttttttatattaaattgtgtttcaaaaatgttgatggtaatatgaagtttctacacccagggaaacaattcaaaggaagagaaagaaaaaataattaataacttctacccccttctcattcccactccatgccctccagacaccaacccagcctcattccacagccttccccaggctggaagatgctgtacagatgtgtccacatccacatgttttggtttgttttttcacaaaggggctaaaggtatgcataaaactgggtaacttgcttttctcacttagtgaaaccacagacatgtcaacagatgcagaactaactctgcttcgcagaggcgacctgatacttcatactatggagaccctaccctcgatttgattcctttagtaatgtttattaattttgttttcagggtttttttttgcctctagaaacaatgctgccataaatatctttttttcctatatgtaacttttacacggagcttttattggtgtgggcagattcccaggaacagggttgctgggttatgggatttgtgtattgccagctcactttccagaaaaatgttgagcgactcacattccctcaccagtgtgtgagagggcctgttcctttcaatcctggccagcactagaagttagctcatctgttcattcagcttgatgtctaagtgcctcctgtgtgttagacgttgtcctagatgtcggaaatacaatctgaaagtgatcatccctgctccctgggggcttctgttctcatggagggaagacagatgacaaacttgaaaacaactattttaaaaaagacagttgtcaatagtggtttgtactgcaagaaaatagagggggagagagttgctgcttgaggtcaggtgattgggggtagaggacttctccaaggaggtgacgttggagctgaccaggaagcaggggtagtcatgggaagagcattccctccagagggaacagcagatgcagaggccaggaggcctggggccaagcatgggagaggggagtagaggagatggaaggggagaggccatcaggggcacatcataagggctatgtgggcagcagtgaagactttgagtgatttctaatggtgggggaagccaacgaagagttttgaagagttttagcccagaggacattttcactgagtgattacagttggccaggtgtggtgcccgggtacaggcattaagtggtaggaacccccagcccacacctttgtgatccttttgttctacaacagggcttctcaacctccacactactgacctttgggcctgatcattctttgttgtggggcctgtcgcgtgcatcgtacagtgtgtagcagcatccccagtctctaccaactaaacgcccatagcactcccctgccaaattatgacagtttggcaaatgtctctagacgttgacaaatgtctccgggggcagaattgttcccgattgagttccaaaggcttctgccaacttggccttatatatatgcccccctacaattaaaattacttttcacttgtggaagttggggccatttggcctaagaaaggctcttctttgtcttagtggttcttacgctttaagacgtgtcagaatcacctgggaaacttgcttagaaataccgattcaggggccctacccaggtagtttgattcagaggatctgaggtggggggcaggaatatatattctgagtgagattttaataagcatccccagtgattctggtactttgagaattggtgcaccagctacaagagcattgtgttggagaggattgaggcttttctgggtgatcttgaagggttggagatgtagagaggcatgtttctgtttatagcagaagaaaaactcatttccagtcagaggtgttggtggcacgggtagtgagcccccatcacgggagaagccaggactgagccagcatgtctcagactccaagaatttgtcctcatctgtgtcatggatcctatttttttactttgccatttacttgatttggctcactgattttttttttgtttttaatttaaatcaacttagtttaaaagggtattctgtgtgactgctgtaaaagaagctgagttttgctgtaagaagggaaacaaactttaaaacaaattgaagtaaagccaggtagttctaatgagatattatggtcaccctaactttggggcctgaaccctgcttttctttttaattttaatttttaatttttctgggtgtgtagtgggtttatatatttatggagtacatgagatattttgatacgggcatacaatgtgtaataatcacatcaggataaatggggtatctgtcacctcaaggatttatcctttgtgttacaaacaatctgattacatttttagtgttttgtttttttttttttttgagatggagtctcgctctgtcacccaggctggagtgcagtgttgccatctcagctcactgcaagctccgcctcctgggttcatgccattctccttcctcagcctcccgagtagctgggattacaggcacctgccaccacacccggctaattttttgtatttttggtagagacggggtttcaccgtggtcttgatctcctgacctcgtgatccgcccgcctcggcctcccaaagtgctgggattacaggcatgagccactgcgcccggccagttatttttaaatgtatcattaaattattattgatcatagtcaccctgttgtgctgtcaaatagtaggtcttattcattctttgtgtgtgtgtttttttgtttttttggggtttgttttttttttttttttttgagatggagtctcgctctgttgccaggctggagtgcagtggtgcaatcttggctcactgcaaccctctgtatttttttttttttttttttttttgagacggagtctcgctctgtcgcccaggtcggactgcggactgcagtggcgcaatctcggctcactgcaagctccgcttcccgggttcacgccattctcctgcctcagcctcccgagtagctgggactacaggcgcccgccaccgcgcccggctaattttttgtatttttagtagagacggggtttcaccttgttagccaggatggtctcgatctcctgacctcatgatccacccgcctcggcctcccaaagtgctgggattacaggcgtgagccaccgcgcccggccctctgtatttttttaataccaattagccatccccacattccccccacccttccactacccttcccagcctcaggtttcttcatcattctagtctctatctccatgagtttgttttaatttttagctcacacaagtgagaacttgcaaagtttgtctttctatgcctggcttatttcacttaacataatgacctccagttttatccatgttgttgcaaatcacaggatcttattctcctgcttttcttttgtttcaaggggcgagtgatgggttgcagggatgttaagatatctctccacttgagactttatcctgagcttgtcaggagaactggaggagaattgaatcaagatgcatttctctaggcgaatctggctctgagagcccctgggtggaagttccttacactcatatctgctagttgaacctcatggtaaccccatgaagtctgggggaagtgcccaaagaggccacaggtggttctggggcatctcagggggcctcagtccagcactcacactcaaggagggatccgggcagggccattgggagaaggcagggtgtccggtggccctcagcagcctgcgggaatgtgtgtgagtgtatgtgtgttaaccatatctataggagtgtacatgggagtgcatctgtgaggcattgtagcctggaggctaagctgtggacccagacatactctgcctgactccagtcccagctctgtaatcttgagcaagtggtttaatctcctcgggcctcagcctcctcatctgtgaaatgggtaggtagaagtagtacctaccttccaggatggttggaagatcaagtgatatacattcaagttccctacatgcagtaagccctctaaatactcactgttgatgtatgtgtatgtgtgtctatctgtctgtctctgcttgtctctcagtgggtgtgtgtctgtcctgtctacatttgtgaggccagcctaggcctggtctctcagcatgcctccctctttcttctccctacagcactgttggtcaccgcaggcctgtcttcctattcaccgtgggcagcagagggatggctgctcagctgctgactgatgaggcactggtgagtcatgttgccctgtcactctcctttccaaaggctggatcctgccttgggtgagcctctgctgctcgaaccctctccaaggcccccagtcccatcttctggggctgtgtctgccctgatgaagagggctgtgcttatagatgatgctgaccctggctgtggggtcagttgtaggggacagggaagctttggaatggccaaactagctctctggactcttaggagacacaggtgggcacctgtgggaagtggtggtttagacatgtgacattgagtgaaaacttgcgcaggaccatgctggatgtgtgacctttaaaatgggcaaacacactaaatgcttcttgtgaatgtgaatgcccacatgtgtgatgaaagtacaaaagcttatgggaatgaggcccacaaattcacccatgattttaccccaaaagataatcactctggaatgtttgagtctggctaagcaattttaatgttaaagattgctttttcatcagagatttcatcctgagcatttctccacatcattaaaaactcctttgtaacgtccatcttaatgaccccataaaagtgttgttcagtggccataccctggtttacttaatggttcctctgttgttggacctttattggtttccaagtattctttttttggttataaacagtgtcatgagggacactgggcacaaatctttctttgtgtcttatatgatttctttaggagtgattccttgaagaggaagattgggttgggtatttttgaggtattttgatattatttccacatcagttacggcggtatgtattcccaccagcatgtctgagcgggtctctgatgatttatatggctgttgtcaggcatttattctgcatgttggatatatttagattggtgcaatattgcaccatgataataaatgataaatggatataaatgacaaatgctataaaccatgatgagcctgataggggacaaatggtgccacgtgatttatttctgagtagcattgtttgtattattagtgaagttcaagtcttagaaaatgtttactagccatttctgtgggcagggaaatgatccatcttgtgctttagcagtctacaggaatctgagtatgctttaaagactttacagaagcaaatgtgtgtgtgtaaatatttgtggcaaatattcttcccagatttgctttttgtttctttattttactttattttttctgtataaaagcatttcatatttttaaaatcaaatctgttggtttctcccactgtggtgtctttcttcatctttaagctgtgaaagggtttctccatccacaggtcacatagcagctatattttcttccttttcaccatttgtcatttgaatgttaacaatgaacttttgaatctacctgtaattgattttgctatataaatgtgtcagtagacttatttgggagctttggtttattctgtcttcatttgtttggtacctttgttgaggtacacatcacgtatcacaaagtgtacaattcactgattttgggtacattcatagagtcgcgttaaccatcaccacagtccatttcagaatattttcatcatcctgaaaaagagccgagtacccattggcactcatttccattttcccccatcagtccacggcccctggcaaccagtaatcagctttctgtctctatgaatttgactgttctggacatttcaaataaatggaatcatacatggtgtggtcttttgtgactggcttctttcactcagcataatatttgcaaggttcaaccatgtggtagcacatatagagcttcattcctttttttgactgaataatattccagtgtgtgtttctacatattttatttatcctttcatcagttgatggacatttgggttgtttccactttttggctattatgaataatgctgctatgaatattcatgtataagtctttgaacatatgttctcagttctcttaggtgtgtacctggaagtggaatgttgggtcatatggttaactctgttgaaccagtaaaggaaccaccagactgttttcctaagcgattgcaccatgatgccttcatttttgtctcatctgtgattcttgccttgaattcttcttttacctacattacttagaaagatttgttgattgtttttatttcaacagggttgggagttttggtttaagttttttttttttttaattactactagtgtaattacattcaatttttaaaaaaaattgagcctgtctggtttcagcgttttccctgtggtgaaatggtttgtgtcattagacaggaaaccgaaaaagatggagtactagaaaaaggggccttggacacgtacgtgcagagaactcagaggccctttgttagcacttctgtcccaacacgatgggctcccagacctggaaggctgtgttctgtgtctcagcacaaccctggtgccagtctgggcttggtgcctggagactgctcagtgaatagttgagtgaattaggtgggtgtacttagggaagacttccagaaggaattgttgtattacaattttgtaaaataaataaatataggtgtgagagggaacttttggaggtaatggatccgtttatggccttgatggtggtgatggttccacgggtgtatatgcatctgcaaactcatcaagttatgtatattattaaatatgcacagctttttatatatcagtcacacctcaatcaagtagtttaaatttttagaaaaggaggaattattagctgggctggctgaaagatacattgggccaaaaggtcaaataatatcatataaggatctacagttgtacataagatatatattaaatatcaacattaaataatagcaagagtcgacatttactgagagcttcctccatcacacgaggcactgtgtttggaccatatttgtacacatttaaccttacgaccctgtggagggggacattgttatcaggaagcctgcctctcatatgaggcttagaaagagaaagacagttgtccaaggaaacacagctcatgaggggcagagccaggattccgttgcagagtgtggttcctgagcctacactctgaaccaccagcccaactgctttctatcaaaggtgacccctcaggcagaggaggctatcttgagcccaagccccagaagggcaccctaggaccatagagggactagccagcgggggtgaggcctccccttgggattcagttggtggtggggacactcagtatgctggagagagccagtgagctctgagtgtcagtaacaatagctggcacttattgagtgcctgctgtatgctatgcattaccattctgagtgtcttacataaataagtgggcaggtggggcctgtagcaaattggagctttcttgccccatcaaagggtcagccaccactcagctccagcctagagtggccagatattctgctgtttaaagagaaactagaaattcattttcttggtaaattgtggatgtgtttttcatgtgagtaacaattaaaaacaattttgaaacccccataggagcaaaatagaaatgtgtacagctggcttcaggcccaggtacatctcatatgctctgtgtgctcagaactcccgttctttccttgtgccttgggggttgtaccactgaatcagttcagaacagcaggtccctctgtaggacacaataggtctctcattactcacatgccatgctgtgaggaagcccaagcagccacaaggaaaagtgatgtggagaaaaagagatgcccaccaaggcctcagctgtgccatccataccagctcaagagacagacttgtaaacaaagaagctagcagactactctagcccagctgccatccaactgccaccacacaagagatgccaggcacgaactgcccagctgagcccatcaaccccaaaatagtaataaattgttgtttttgagccattaagttctgagatggctgctacccagcaaaatataactggatcagaaatttaatctgtggccatggctcaagatcttcatgtggcagagtcatgcatggatgatgtgatcagccagcaataatgtgagacgtgcaggccttcatcacactagggaggaggtcgactgtcaagcaccatctctggaagtggcttcaggatcgcttgtgatctgtctggaagagaagcgccagctgggacactctgtgatatttatccaactgtcttctttataggcaaaagacgtgccatccatctcagggtctgatccaaactaaactgctccttggctgtgatgccagctagattggtattatacatggatgaggccatctaatgttggggctgagagttgaactgactaggtttaaaatgctgccactcccatctgtgtgacctcttgtgcctcagtctccccctttgtaaaagaaatgagctcataaaagtgcctacatagtagggttcttttgaagattaagtgagatggtgtgtgcagtgggcttagaacaatacctggcatgtagtatgtgcttaatgaacattagttatttttatcattatttactaatgaattagtatggaagaaacctggtgccaataccatgtctgtcttattcacagttgtatgcccagtgcctggtgcatggcaggcacttaataaatattcgtcaaatgaatacatgaaagggtgaagtatcactctgtgtgtttccaggaaccatcaatgaacatatttagaatatgttagaatatgtattagataccattgatctagaattcctgtttagggggtaaaaattcaaccatacttttctggtagcccggaaaattataaattaatcagttaaatttccgatccagttatattttgctgggtagtaaccatctcagaacttaatggctcaaaaactacaatttattactattttggggttgatgggctcagctgggcagttcgtgcctggcatctcttgtgtggtggctgttggatggcagctgggctagagtagtctgctggcttctttgctcacatgtctgtctcttgctgtggtatggatggcaccgctgaggccttggtgggcatcttttttttttccacatggattttccttgtggctgcttgggcttcctcacagcatggcatgtgagtaatgagacataatgagacacctgttgtgatgactggcttctcccagagcaagtgttccaggaggctgaggcaggagctggaagtcttctgtgatctagcctgagagtcccagaacattacctctgccagattctattggtcaagcaggtccctaaggccagcccacattcaaggatgggggaactagactccactagtgaaggatttgaggccattttcaacaagtctacccacttactattgtctaccaaagctgacttatattgaaagagacagtgaaaatgggtaatttgatccagcaaaatataactgtatcagaaatttaactggtgttttaatttacaattttctgggctaccagaaaagcatggttgaatttttaccccctaaacaggaattctagatcaatggtatctaatacgtattctgatatattctaaatatgttcattgatggttcttggaaaggtacctgcattttccttgcttgggcagcaggactgggcatttctgattcacagccctgagtatgataattgagagtatgagagttgtatgctcattttgggcaaatactcaaagcaggtagctttttatgtgtcttcctatcacatacgattgctttcttgggcctgttcaaggtaccatgtaagaaatttaaggattcagtcatttgttgtacaaacatttattgagtacctactaagtgccaggcgctgttctagggtctgaggattctgtggtggcccaggcagacacaacttcacaaccccccatgacgtagatgctgttatccccttttaacagaggaagaaactgaagcctgcagaggttaggtaattgaagatgttcactttcatacattcacatagctagaaaatggccaagccagggtttgataacaggtctttgtacttcccagacatgcccttaagacactgcactgtctttcaaaaaacaaacaaacaaacaaaaacactcacccccctgtattacttgtggctgtgtaacaagttacccccaaactcagttgcttaaagcaacaattatttactattttacacagtttctgagggtcaggaatggggcagtggcatggctgtggctcaagatcttcagtcttctcagggcttcccaggctgcagaatcccttctgagagcctcacacagtggttggtggtgggatgccttaactccttactgacattggtgggaggcttcagctgctggtcagatgggcctctccaaaggactctgcagggcagctggcttcctccaaagtgagtaatccaagggaaaaagagggagtgtgcccaggaccaaagctatgatctttataacctttttgtctttttttttccccctaaatttcttattgtgctaaaatacacataacataaaatttgccatcttaaccatttttaagtgtgcagttgagtggcattaaatgcattcctaatgtgcagcgccaccaccatccatctccagaactctttgatcttgtaaaactgaaactctgcagccattaaacaaacactttccatccccctcccctccgcccctggcagctgccattccacaagtctctataaatttgacttgatacttcatttaaatcatggaatcgtgcagtagttttacttctgtgtctggcttatttcgctgagcataatgtccccaaggttcacccttgtagcatgtgtcagaattttttttttttaaaggcggaataatatcccattgtatgcatagactgcattttgcttatccactcgtgcttacgtacacttgggttgcttccaccttttggcgattgtgaatagtgagtgtgcatataacctttccttggaagtgacaccacactaacctctgctgtatgttgttgatcacacagaatcaccctggcacagtgaaggggctacataaggctgtggataccaggaactggggatcattcggggctgtcttggaggctgccaacacacacacacacacatacacataaaacatgaaaatattcacagtgtcactcctctgatacagctgctgttcacattttgacacatttccttccatctttttcctgtgtattgttttcatgtggttgagataaaatggttatttagaattctggaaacccagaagcaactctacatggaaaagctctgcataatcttgtaatgaaaatagctatgtaattggccatgggggtaggctattatttaatgaatcccatgacatggatgttatggttgtccaaagacttgcccatataaataaaatggagtggacatctttgtgcatgaagctttgcccaatttttggattatcttgttgggatagatttccagaagtaaaatgtctgaacattttaaacacataaaatgtgtaatattaaccttttaattgaagaaacaataggtaaaacgcacctatttgaaaattagtaaactgggaaaatgaattctcccacttcccctccccatcctgaaactactggcatcacctgctcttaccagattctattttggttaagagctttattgaggtataattcacgtatcgtaaaatccatccatataaagtagacacattaatatccagtgctttttagtttatttacagttatgcaaccatcaccacaatattttagaaaatttttaccactccaaaaagaaaccccatacccattggcagtcactccccatttctctccaacccaccctcacccctaggcaaccacacatctaccttcattctattttgcctattccggacattgtatataaatgaggcatacgatatggattttgcctgtcccggacattgtgtataaatgaggcatacgatacagattttgcctgttccggacattgtccataaatgaggcatacgatatggattttgcctgttctggacattgtacataaatgagccatacgatatggattttgcctgttctggacattgtacataaatgaggcatacgatatggattttgcctgtcccggacgttgcatataaatgaggcatacgatatggattttgcctgttccggacattgtacataaatgaggcatacggtatggattttgcctgttctggacattgtacataaatgaggcatacgatatggattttgcctattccggacattgtgtacaaatgaggcatacgatatggtcttctgtgtccggcatctttcacttggtgtcatgttttccaggttccttcatgttgcagcgtgtgtcagagctgtcgtgtggacgaaccacattgtttatccattcgtcaggagatggacatttgagtcgtttccactttgggactattgcgagtaacattgctatgagcatcagtgtatagtttttgtgtggcactctgttttcatttttcttagatatctaccaagaatggaagtgctaggtcataaggtaactctgtgtttattcacttgaggaaatgccagactgtcttccaaagcagctgaaccattttacatccccaccagctgtgcattcttaccagtttcttgcattcacttccataaagaggtctgcgcctgtataagcacatatgtgtaaatttccctttattatttcctcttatggaaatgttaacaaactagacacactgttctgggcattgatctgttttttcatgtaacagtatattcgggagatcattctgcacctgcagctaaggggctgccccctttttttttgttatggctgtgtgtattccactgtggtggattcactgacctgatttatccaaacccctactgatggccatttgggatgtgttcagtctttttacttcttcatctgatactgtaataaatatccttacacatctatgtttttgcatgtgtattaatatatctgaattagtctaaagtgttcaaaagaatttgaatattagttttgatagattttgctaaatgccactccatagacattgtcccagtctgttctcctatcaggagtgtcagagaggaatgtttcagtatttgagttggagagagtatttcctttagagaggaatgttgttgcagtatttgtccttttgtgactggcatatttcatggagcagaatgtcctcaaggttcacccatgttgtagcatgtgtcagaatttctttccttattaagtctgaatgagatttcattgtatatagagaccacattttcttcttctttttgtctgttagtgtacacttgttgcttccaccttttgtctattgtgaatagtgctgttaggaacatgggtgtgcaaatacagagtgcacctgtaaaattctaaattagattctgtccctctcctgctcagaccttccaaagaatgaataagaaggagccagcttaggccagacctgaaggaagagcattttgggcagaagaaacggctagtgcaagttccctgggggatattcgaggagagaaggcaggctggcagggctggagcagagcacaaggggcagagcagttgtggggacagtgtgggggtcagaggtcagagtcaggactacatgtatgggcaccacaagttttcattacctgccgctctgggtggttcgtgagaggcagcagcctgcaaggatgaggactcgggctctggagacagcccatgaggttcaaagcctggctgtcccacgcagtagctgtgtgctttggtccaggaacctaccctgtctgtgccttggtttcttttatctctaccttccagcctccctccagtgccccctattgacagagcttcacagggagtagctgctaaggcagaaacatcacgggatcgcagagtcaaagcccgcagatctctgtgcagagtgtggaaggggggcttttggggatgaaagacaatcacttaatcacttttaaacaggcatactatattataatgttagcacctgactcgtaggtctgttttaagttaataatgactgaatcaatatgtgccagcacggtatctatttctcaaggctgctgtaaataagtaccacagactgtgcagcttaaacaaaggacatttattctgtcacagttctggaggctggaagtccctgatcaaagtatccacaggaccacgctccctctgaaggctcaagggaaggctctgttccaggcctgtctcccacctgctggcaagttccctgacttgtggcagcataactccattcttcacacagccttgtccctgtgtacatgtctctctctgtccatgtttttcctttctgaaatgcaaattaaaaccacaacaccaccttaccccagccaggatggccattattaaaaagtcaaaaaacaatagattggcgtggatgtggtgaaaagggaatgcttatacactgctgctgggaatataaattagtacaacttctttggaaaacagtattgaggtttctcaaagaactaaaagtagatctcccatttgatccagcaatctcactacttggtgtcaacgcaaaggaaaataagtatttatatcaaaaagacacctgcacgtgtatgtttattgcagcacgattcacaattgcaaatatatgcagtcaacctaagtgcccatcaaccaatgaataaggaaagtgcccatcaacccatagataaagaaaatgtgatacacacacatataatatatatgtatatcacatttatacacatacacacatacatacacacacataccatggaatactactcagccataaaaaataatgaaataatgtcttttacagcaacttagatggaactagaggccattatcataagttaagtaactcaggaatggaaaaccaaatgctgtgtgttctcacttatgagtgggagctaagcgatggatatacagaggcatactgagtgttataatagactttggaaactcagaagcgggcaaggtggcaggggggtgaggggtgaaaaactacatattgggtacaatgtacactattcaggtgatgggtgcactaaaatcccagactttaccactgtacatttcatccctgtaaccaaaaattacctgtacccctaaagctattgagattttaaaaattgaaaaacaaatttcccttttctataaggacaccagtcctgttggattagggccccctacccccactccaggatgacctcattttaactgatttcatctgcagcagccctgtttccaaataaggtcatgttcttgagaccttgaaggttgggacatcagcatatgaattggaggggctcataattcaacccataccaaccacttagagtagtacctggcacatagcagctgctgcataatgactggtgttgcctacctcatcatcaccatccacactgctccgccaggttctttcagtccacaggcttgtgacatctaccacaaagtgctgctccttccacgtggacttctctccactccccagcagtctcatctgccttttcaccttcgggtcttgatccaagctctcttccctacccagaatctcccactaaagacccaaccaccagttctcttcacagactactcaaagtcttcctgggcaccccccacagctggcattactcaggcacctggagacctttgttcataccttcatgattgattgcgtttaccaaattacgtgtctttgtctgcctctgccatgaggaactagttcttgaacattttgtgtctgtatcccagcactgggcttgctgcctggtgcttagtaggggctcagaaaagttagctgtgcccctggattccatctggggctctgcctctgctgtgctcctaatgcatttgttgattcactgggttagactcactttgccttcagttcctttccatctggttctcagatctgtgaccttctgttccagaatgtttcatatgggatttatttctctatcagagtgccaacccaatataactagacacagagaaaactgtgagtgatccctttagaactctgcatcttattgaaatcacttcagctacatcccatctgcctcccctaaatcctcttggcttttctggccattcctccacgcctctgtaaggagggccctgcgatgagcggatgtgggtttcctcttacaggaatcagtgacgttcagggatgtgactgtggacttcacccaggaggagtggcagcagctggagcctgcccagaaggacctgtacagggatgtcatgctggagaactacaggaacctggtctcactgggtaaggggcagcttcgttgagttactcatcattggcccataacttcaggaccacaaataaattaaaaaaaaaaaaagatcaacagatctgactacatggaaagttttaaaatttgctctacttgaagctaaaaataaagttgatcacgatggtatgggaaataatatttctcacgtgttttacattcaaagggtcataattatgtaagcagctcctgggaataagaaaaagactaagcgaataatagaatggaccaaacttatgagctggtgattcatagatttagaaatacacaaagttaacactttataaaagttttttaaaccttactactggagacacacaaattgaggtactagcagtttttgcccatgaagtgcacaaagatgaaaaaagaataatagcccatattatgaggctgtagaggaaaggactctcattttaggagtataaagttgggacagctcttttggaggatagcttggccttatcagtcaaatattgaaggattccatttttagagatctgtcctttagaaattctcatgtaagtatgcaaagttttccatgggaagaaaaatcaaggaaaacgacctaaatgcccagctgtctaagactgactgaacgtatcaaggcctatcgatatgttggaaaccaggcagctcttcaaagctgaggactgtttgtaggcactgccatgaaaagatgtcccacaacatactgttaggttaaaacactcacttttgtaatcagagcgtggtcctatttctttaacagcttttctggaggtattattgacctgtaattaaccacgcatatataaagtgaagagtttgatgcattttgacatagtgcatacccaggaaaccatcaccatgatcaagataaaggacatatctatcatccccaagagattcctcatcctcctttattacccctctctccccttcctcaacccccatccccagggatcccctggtctgctttatgtcactgtggttgagtttacctgctctccagttttatatacatggaatcatacagtatgtacccttttttttttggtctggctttttttggtttgacttggcattattttgagattcacccatgtcattgcatgtctcatagttcatttatttttatctctgtgtattattccactgtatgtgtatgccacaatttgttcagccattcgcctggtgatcaacatttgggtcatttccagttctgggctattacaaataaagctgctgtgaacatttgtgaacagttctttgtgtagacatttgcttttccttctgttgagtggaaagtctggatcatgtgctacatgtatatttaacttgtttaagaaactgccaacctgttttccaaagtgattgtactatttcacatttccaccagcagcgcacaagcttcattctaattgctttatcttttaaatttagcctcccttgtaggtgtgtggtctcatcactgtgcttttcatttgatactgacacttgtaggtgtgtggtctcatcactgcgcttttcatttgatactgataatcttttcctgcgcttatttgatgtttgtatattctctttggtaaagtatctgttcaagtcttttcctgtttttttttttttttctgttgggttattattgaattttgaaagttcactatgtattctttaactatctagaagtccaatgcgctatccattgcgtcacagagccagaccactatgtattcttgatacaagattttctttagatatatgccgtgcaaatattacctcccattctgtggattgtgttttcactttcttgatggcattatttctgactctaaagtttttaattttgatgtagtgcgatgtatctattttttgttgttctcgttgcctgtatttttggtggtatatctaaacaatctaactcaaagccatgaagatttattcctgtgttttattctaaggttttagtggtttagctcttcactgaggtctttgatccattttgaattaatttttgtgagtgatgtaagaacggggctcaacatcattcctttgcatgtgaatatccaggtgccccagtgcaatttgttgaagagcagaagtttttaattcaatgaagtccagtttatcaattttttttggttttggtgtcatttgtaagaaatcttggcctatcccaaggcctcagaggttttcttctgtaagttatatagttttaggttttacattttgttctttgatccatttagagttgaattcttaatatgatgtaaagtattaatccaagtttattggggtatgttggggggacaaatgtatgtccagttgtccaacaccatttgttgaaaagaccactttctccaatcgcctttgcatttttatcaaaaatcacttgtccatacaagtgtgggtccaattctgaatcctgttctgtccatctgtttgtgtgcctttgcaccaataccaagcaatgtcatcctttcagatcttgcttttatgacttgtgcccagtctagaatgacattctcctcaagatcattctgggttttctgcccaaagccccatgaatgacaaggttttacagtctgattggtaggaaaaggcactgttcccagccctgtgtcagctccggtcactgttttcaaatcctttcagatgtttttttcctgtgttgggtagtttcctgacatgcacgttttgaccaatagtctgctaaatactggagggagttccttgcaggtcttcagaacactgtgcagctcattcctctctcatctgtcctgggaactctatctgccttggtctctcagctctgtctcctcaacttggggagttggccagactgtacctcaatttacctttcctttgtcagagcctggaaacttcccaggcagttagctggggcagttgtaggacccaccttgtttgattttcttctctcagggattttgcccttcattgcctgatattcaatgtcttcacaaccattgttttatatattttgttttaggctcaagggaatcttatcctttatactctgtcttggacaaaagccccatttgggggaaaaatgtgtgtgtgcatgtacaggcgttggaggggagtctaaaatataaaccaaactgttaactctggtgagtaagattacaggagacttccattttcttttgtttttttttgttttttttgagacagtcttgctctgttgcccaagctggagtgcagtggcatgatcagagctcactgcaacctccgcctccctggttaaagcgattctcctgcctcagcctcctaagtagctaggattacaggtgcctgccaccacacccagctaattcttgtatttttagtagacatagggtttcaccatgttggccaggctggtctcaaactcctgaccaagtgatctgcctgattcagcctcccaatatgctgagattacagagacttccattttctccattactgttttggtgtttgatgttttaaaaacaagtgtgaattactttctaatcagaaacaagcatagaaagacagaaaactgaaaaagtgtgaaggacgagatttagcaatgtgaaaaaagaatgcacctacatttgtatcaaaaggaatgaatagcgttttgcacattaacggcttttggcgaaagtgccctctgcagaagcttcggatgtctcccatgacagtggccatgccgtcagacttcctgctcttttgctgacctgactagagaaaaggtgtgatcgggtagttttaatctgggtggtgtggaactgtgttttcacagctgtcgtggttaagggctgagtgtttgctgtttgcagatgatctctactgcagggttttagcctgagaaagggaggtggcttcctcccctctgtccctctgctggtatgctgcccccagctctcctgatttctccaggtcatgttcactccaggagacttccagctgtattcacaaccaagactcctggtcctctccgatagctgccagctcatattccagagcatctcagactccatcagccccagacaaaattcaccatcacccctggagacagtcttctctccaccgagtctacaccccacactaccatctgtgccagcatctgggcattgtgccacaccctgactagggtctctaaaccacaatcattctcctgcatgaagtatttctcagttcttttcctctgagatgggaaaagtgatgcatggtaatatagccactcctcaggagccacagctcgggggccacactgccagggcttgaatcctgctgtgcctcaggtgtattgtgccctcgagtacatctctgactccattcttgtatctccgtttcctcatcagcaaaatgaggatggtcataactatctactactgtatgtaactcaagtatgattgtgagggtctccagagatccgtgcaaattgttcagcactgtgccaggcgtgttgccagtgctccatactcgcttatctggtaccttctgtgtgcaggctgtgtgaggagctggggggtgagcaaggcccttgcctctagtggagctgactcctgctgggggccgataataatcagatcaagggacaggcagagaaaaattgccacaggtcactgagtgttcataaagaagtgggcaggaggaccttccttccttacgtagggtggattgggaaggctcccgtggggttgtggggaaacaggcctgaaggataaggacgtccacggcaggtccacaggacagtggatgcagaggccctgaggcaggaagaacacacggacaagagggagagcatggtgatgagaaactgggagggagggtgggcaggggacgactcaggcaggcctgctgggtgctgagggccctgaggctgctggaggtcctggcatcattctcagtaccgtagggaggtcacgggagggttgatctgactcctcagaagaccgcactcccggaggagtggaggacgcattgcaggggtgagaatggggtggggaggacagagaggagctgctgtcgcatttcaggcaaggacccgtggtggccagccggctttttgtcagtggggaccgggagatttggtctgattcaggctgtttgcgcacagcaatgcttgccagcagtcaggacggtgggagggaaagggcaagtcaggatgtctgctaagtctctctaaaacaattttttaaattttatatttaaaactgtgaaaaatatatagagaacataaaatgtaccattttaaccacttataggagtacagttcagtggccttaaggacattgatgttgttgtgcagccatcaccgccatccatccccacagctcttttcatctcccgcaaatgaaaccctatccccattaaacaccaactcccacccactcctcagcccccggcatcctctgttctaccgtctgtctctgggaatccgacctccaggtaccgcagatgagtggaatcacatggcatccatcctttcatgtctgatttattttactaagtctctttgatgggctttgcttttttaaaaaatgtttttcatggggaaagtctgaaatcccaagtttcgtatcggatgtgttaggcttgggctatccagttgagatgctgggcttttttgaacagtttggacatagcccagaaagcaggtctgggctgaaggtgtatgtttgagcagcatcagcctgtggataacgtttagatccagactcactttgtgtggctttgaaggtccagtgtgattcaggagagtggtctcaaactcaggtggcctcaggaactaccaggtggatcatttatgtggaggagggggacagctgctgccccatgcaatgtcttgttgcccataagaatgaggctccacgtggccatatcttcatgttttttatgagctagcagccacatggacagcaacttttaaatgctgggaatgagtcccctgatgcagagtctagactccacctaggctagaaatcgaggtttagaaatgaacaggatacacgtggaaggtgattgaagctgtgggcacagaggtatttagccagggagggtggatgagcagagaaagagggtctgaacccaagctccacggaatgcctgccacccaagaactaggcagcgtgtgacgtagcaacagaagcaattgtgagaccccaagtcatgtgattattgtgggctcaagtgagcggtcctgtgtgtatgaacacttagtgctgaggctgatgagagggctggggtgcgggagggctggggccagccagggcaggtgcgtgatgagctagcgggagccggagccccagccaggggagaggatcttgcagccagcaaccctggggcagccataccagagaagtggcaaaggggcaggagaaatgcccgatttttctctcatttcacttccagtttcctgcctttggccaaacacacaggaagccagtgggcaaagtcagcatcctgagcacagggcaggtcagagaagggtggagaatagaaagtgggtcgaaggagtagagaataaccaacacatgccatataaatgctagctatttattatttctttattctttttcttcttttttcaatatttatttatttatttattttttaagagacagggtctcaccctgtcacccatgctggagtgcagtgacgtgatcatagctcactgcaacctcgaattcctgggctcaagtgatcctcccacctcagcctctcaagtagctgggacaataggcatgtgccaccatgcctggctaatttttaaaaaaaaatttagtagaggcgggggtggggggtctcactatgttgcccaggctggtctcaagcaatccttgcctcagcctcccaaagtgttgggattacaggcatgagccactgtgcctggccatcttattatttctgataaaaactgttgcttgaggagcacgactggttgtggatctgcaggatgaagtgaggaggccctgcaagtcagtagccggctgcagtcattcctactcaggtttgcagagcctgccctttgctccctgcaagcccagctcactactgcagtttctctccaggagtgcctgtcatccctcttctgaagggacatttgctctccctgttcacctcctgtgttgactctgcttcataaaccacattggcctcagttccatgcctccctcctccctccctctctgatccaaggttcttctttgctaactcgctctgtgccttgggcctcattggggtcggtttcatttgctccttcctgctgtggagcttcctcactcccagcatctttaactacatgtatttgcatcttctgtttttgtttttttcagactgggagactagacctgaaatgaaagagttggatccaaagaatgacatttcggaagacaagctctccgttgttggggaggccacggggggacccacgaggaatggtgccaggggtcctggctcagaaggagtgtgggaaccaggcagctggccagagaggccgcggggagatgcaggtgcagagtgggagccattgggaattccccaggggaacaaactcttagggggctcagtacccgcatgtcatgaactgaaggcatttgccaaccaaggctgtgtcctggtcccaccacggctggacgaccccacagaaaagggggcctgtccacccgtaaggcgtggcaagaacttctccagcacttcagacctcagtaagccccccatgccctgcgaggagaagaaaacctacgactgcagcgagtgtggcaaggcctttagccgaagctcgtccctgataaagcaccaaaggatccacacgggagaaaagccgtttgagtgtgacacctgtgggaagcacttcatcgagcgctcgtccctcaccatccaccagcgggtgcacacgggcgagaagccctatgcctgcggggactgcggcaaggccttcagccagcgcatgaacctcactgtgcaccagcgcacgcacacgggcgagaagccgtatgtgtgcgacgtgtgtggcaaggccttccggaagacttcctctctcacccagcacgagcggatccacacgggggagaagccctacgcgtgcggggactgcggcaaggccttcagccagaacatgcacctcatcgtgcaccagcgcacgcacaccggggagaagccgtacgtgtgccccgagtgcgggcgagccttcagccagaacatgcacctgaccgagcaccagcgcacgcacaccggggagaagccgtacgcctgcaaggagtgcggcaaggccttcaacaagagctcctcgctcaccctgcaccagaggaaccacaccggcgagaagccctacgtgtgcggcgagtgcggcaaggccttcagccagagctcctacctcatccagcaccagcgcttccacatcggcgtgaagccgttcgagtgcagcgagtgcggcaaggccttcagcaagaactcctcgctcacgcagcaccagcgcatccacaccggcgagaagccctacgagtgctacatctgcaagaagcacttcacggggcgctcgtccctcatcgtgcaccagatcgtgcacaccggggagaagccctacgtgtgcggcgagtgcggcaaggccttcagccagagcgcctacctcatcgagcaccagcggatccacaccggcgagaagccgtacaggtgcggccagtgcgggaagtccttcatcaagaactcctccctcactgtgcaccagcggatccacacgggcgagaagccctaccgatgcggcgagtgcgggaagaccttcagccgcaacacgaacctgacgcgccacctgcggattcacacctgagcgcctctgtgcagggctctcactggcggtgcccaggacggacgccagatggctgcgcgctttgtcagcagtgctgtgagaagttctcccctggggtggggactcggggtcaggggagctcaggaatgtggggttgtggaggggctggctgatcacacatgccccctccttactgagcctcagaaagcaagcccctcggtgtctgacgtatctggggacacttcaaggttcactgtagctgagccatggccgctggtaacagacatcagggttccagactagccctcttgagtaactgtcctagagctgggacaggtcacgcctgcctccacatctctgtttcttcagcgggaaagtggagctggtggaggggagggaggagacatctccctctttgtcagatacatcctggagtccagatgcagcttgtcaccatctgcattttctccgtgggttgggagcgtgagggccttcctatccctccacccaccgtttccctgcagtgcacgctggcagccaccaagctaggaagtggcaggagtttgccggttgtttgtgaggggaaaaatttttttttcagagttagcaaataacagtaactactgctttgaatgccaaagtttcttagagtggtctgttacgttttttaaaaataaaacttttaattaagggagactatgttattttaaacagtcttctgttttggccagttgtctggtcaaaatcggcttcagtgattgtgggaggggcaagaaggaaaagaaacagcagcaggtttgatattcagaaagaaatatgcatggattcaataagtatatacatctgagcacagattatttttatagtgatttttgcagctaaatgtgaaggcaactgtcttaagtcccttcctgctgctgtaacaaaagaccttagactgggtaatttataaacaatagaaatttgtcactcatggttctggatgctgggaagtccaagatcaaggctctggcagatttggtgtctgatggggtatgttcttcataggtagtgcttgtgtcttgatgtgtgtcttcacgtggttgtaaacggcagacttcctcaggccccttataagggtgctaatcccagtcacaagggccctgacctcatgacctcccaaaggtcctccctcttcatactgttacattggggatcaagtttccaatatgtgaatacagggaagcaccaacagaccatatcagtaacttcgagtgagtttcctaaggccgactgaagctctgtttacacataagagtgttccccaaagtgcactttctctggggccttttaggccatacttttaattttgttatttgatactactggttgctaatgttctggcatttccagttgttccacactccctgacactggtgtacacaaataaataatacagaaaaaaaattatatcagcaagcacattctgcaaataagaaaaacagccactcgggcacgtataaacaaggtggaccgtttttcaaattctggcagtcaagtgggcctcagggtgggtttgattcaggctctcatcattggagccatagctgtggttctctgtgatgctctggctctcccttcatacttcttaacatcatcctcaggctggcttcccacgtgggattgtggtggtttccagcagcgagtcttgatcagacattgctttagttgcatctgttgtgggaataaatgagaatatgtatgcactgcagagaatggagtgttaaaacagtcaacaaatgttagctaatatgtacacaagattttactactctttagcagcaaaatggaggggaagaccttctaaggccctttggagagatgaaatggctcatttaaccctcacaagatcctcgaggtagggattcatgtgcatgtcgtatagataaggaatctgaggttcagtgaggcaaggtaagcttcctgagggcacacaacatggaagtggaggggacagggtgtgagctggggtccacctgggctccgaggtccgtgctccttgcctacactggactacttctagagatggacatattgaatttctcaggacttgactcctggccttggtttcctggactccccagtgtgtgaagcagagatgggatcgaggctgcaccaccaccatccccctctcccatccagagaaccagccgggccacctctcaggtccctcctgtttcttttctctgcaacccaagctgatgtggagggcattgaggctcctctggggggatgctgtggtaccaggtgggtctcacatccctggtctcccgcctcctgggcaagctccccactcagggctccacgtttccccaagaggaaccctgaggtggctggaataatggccacattgacggagtcacttgtccaactctgagggggcgctctcatcacccccactctacagatggggaaacaggctcgcagaggttcaggcacctgcccaaggtcacacagctgctggattcaaacccattctgactccagaagctggactgcagtccacggcaccactccacccaccagttcctcagtcaggtacttactgaagccaaattaaatttacccccctgaaaatgtgggtttggcagggatcaagcaggtcaggaacctgctttttaacaagtcttctatcccatacatctgtccaaggcactatttggggttatgtgctggccttcgagttcaccctcactgggccctgtgtccctgtgtccctgtgtccccaggcctgacccaagcctggccttgaggtagaggtcatgggtgctgggtggggtctgaatgacccctttatcacttggagtaaatgccaaactcctcacaaacccctgtgtgacgcagcctctcccagctcccgtcccgctccccctgctcactctgcttcagccacactgtgctttcgttcagtcccagcgctggcccagcccactcccaccgcaggggcctctcccttcctggcccagcacccacgctgagcttcctcaggtccctgatgctcagtttcacgtgtcggcctggctgggctccagtgcccagcaggcccatcgcagtgagtcccggtggtgctgagaagacactttatagatgtggatgtcacccatgtcagctgactttaagtaaacgattattatctgcaatgtgtgtgggcctcatctaatcagttgaaggccttaagagcaaaaccagtttcttggagagtaaaaaactctgcctcaggattacagtgccaactccggcctgagtttccagcctaccagcctaccttatggatttgggacttgccagctcccacagtagcatgacccggttatttaaattaaatctatttatatataaaagtatacatatgccatatgtataacaagaaatatgaggtatataaaaggatatgtataagatatatatagggtagggcatggtgacccacacctgtaatcccagcactttgggaggccaaggtgggaggattacttgagaccaggagtttgagaccagcctaggcaacatagcaagacctcatctttacaaaacgttagaaaaattagccaggtgtggtggcgtgtgcctgtggtcccagctactcaagagacggaggtgggaggattgcccgagtccaggaattagaggttgcagtgaggtatgatcatgccattgcactccagcctgggtgacaagggaagactctctcttaaaaaaaaaaaaaggtcagtcagtcaaggtggctcatgcctgtaattccagcactttggtaggccgaggcaggcagatcacctgaggtcaggagtttgagaccagcgtggccaacatggtgaaaccccatctctactaaaaatacaaaattagccgggcatggtggcatgtgtctgtaatctcagctgcttgggagactgagacaggagaatcacttgaacccaggagacggaggttgcagtgagctgagatcatgccactgcactccagcctggccgatggtatgagactctgtctcaaaaaaaaaaaatctatatgagatatataatgtatatataataaatgcataatatatataatagcatatatatgatatatctatatgggatatatatgatctaaataaggcaatctatatgataggacatatataactatattaagttgtatcactactgcctctctggagaaccctaactgataacaaggccctccctgatcgcccttcttcccctgcttcgtattccccatcacacgcactgcagtctgtattgatacttgttttctttctttaccatccatctccatcacgggcattcaggtagagatctggatgttgctggttctgctcactgttgttttccccagcacttggcacggcacaggcacaggcagatagtaggtgctcagtaaatgtccgttgaatgaaagagttaatggtaggtgctcaataaatgcttcccggctgaatcacgaataagcaagtgagttttctgaggcagcagcccattccaccctggacctaacatagtccctggagacctggatctgacttggattcctcagccttttgtccactgcccctgtctgatttaaaatgtaggttttattcttattctgagaaggtgaggcccataggtcaggagacaccagggattgaaaagagagttgctacagttcctgagaggcgagggcagtgccaggccacacagggaagcccagggcaggtcaggaggtggaggggctgggggaagacgggggcaggagcttctctgtcgcttccacagcaaggagcaggattggcttctctgagtaatttagcggttctggggcacaggggctgcccttgttgtctggttctcagccctggatgagggcaggtgcacagagcccctgagtgtgggagcccagttggggaggtgctgggtgtgggctctggattgggtggtttgcttgtgaaaggcacgctctcaaggggattctttgccgtctctaggaatcacctggatctgggagtgacagtccctccaaggtcggcaaggcttcaaaatgtcaaagcatcagaaaataaaaggcattgttcatacaatctttgctctagccagagataatcccctgcatttggccttagcatgggcagccggagaaggctctgggcccagatcttggctgaggggcagcctcaggagacccaggctgcagagggaaggcccttctgctcctccctgcctggacaccatcttattgtaggaatcccagtcagtacccgggaacccagtgcgcctgccccagagcatgatgaaggggcctcctgggtggactgatgcccctggcagccgcagattcctgggctgagaatggtccaactgagaggctgggcctcagctcacagcctcagatatgggggagaggaggaaggtcttcctgcagaatcccagtgtggtggcagtttccaaattacatgagatgagctagggatcctctccaagatcacagacttttctatgacccctgacaggccaggcgtagggccatgaacatgagtgatttgagtcaagcaggtgcactatccaacacacaccttacagccctaataatattttattatacatactattatttattaatagaaagtttatatttgtaatagagtcttaaatatttatataaaagagctacatacattaacagggcttacatcattaatatagggtaatactattctcactttcaattgaggaaacaggctcagaacactaataattagttcgagatgatggagctgaaaagccagactttatatgcaatgtttctgatttctaaatggcaaaaatttacatatttgttaagaaacgctattttgggtcaggcgtggtgatgtgtgcctgtcctcccagccactctggaggccaaggtgggaggattacttgaggccagaagttggaggctgcagtgagccatgattgtaccactgcactccagtcggggcaggagagtgaaaggctgtctcaaaacaaacaaaaaatatatgctctttgggcctggactggacaggccacacaaaatacccctggggaagaaggagatttgactcctggcttgcagcctgtgtagggccaccaagtgatcaggtggggtctggggtcagggaatcctgggcccagctgctagttccatcacttacaagctggtgcttgctgagctcacttggtacctggggatggtcctagcatcttatgcacaggggttaggctccaggtgaggttgcagatcttgtgctggttggcatggactggatgcatcaacaagccccagagaccaggagatatcccacactggaaagtattcctcatgcatcaagtctgattctgctgctctccctcagcaggaggatctactccatggggtgactcagggatccaagctccctccaccgtaatttctcaagtagacatctaggcagcagacaggggagggcaaagccatttctggacacatagctctcctctccttccactggtgagcagtgttccttgcaccctcctgcacacaaagggtcatgggaagtgcagtctctggtagggggtcagccaatccccaggaccaactccacaccctggaagaaaggtgcaatggtctgaatttgtgtgtctccccaaaatttacatgttgaaaccctaacccctaaggtgatggtattaagagatagggcctttgggaggtgatgaggtcatgagggtggggcctcatccataggattagtgcccttatgaaagggaccccagagagctccctcactccttcctccatgtgtgggcacagcaagagggctccctctatgaactgggaatgggccttcaccacacactgactctgctggcaccttgacctcagccttaccaggctccagaactgtgagcaatgaatgtctgttgtgtataagccacccagtctgtgatattgttacagcagcccaaaaagaaaacaagagtttgagcggaggctgacccccctgctacccaaagcccagggtggtaccagcacatgtagacatcaggtacaggtataaaaggttaaattcccagtgtttgggggggcatttctgagccatgacagtaacagaataaattgccacccctgcctggtcccagcgatgctcaccccttgctgggatgattgcagaggtctccccgcctcactcttgctccatcctccctgccccgagcctgtttgccacgcagaagcccttcacgtccctcctctgaccataaccctccatggccaaattatattcaaagacatacagactgtgttggaataaattatattgaaagacatacagactgtgcctatttgaaccagatgaagttctaagggctggagaaacagctatgaacaagacttacaaaacccctgcccttgtggggttgatgttcttctgggaagtgacaattttttttaaagccgtggagaaaaaaatctcagaaagaggagggtactatgcagagggtcggggcaggttccagatttaagaaggtggagtggggagacccgctgaggaggagacaggaaagcagaaactcagaggcaggacaaggcgggtgaggatgtgggggaaagtgtttcaggaagaaggaacagccagggcagaggcctggggttttgcccacgcctgaggcagagtgacaagaggacagagaacagatgggggctggatcaggaggggcgctggccggcggggtgaagactgcagcttgatgggtgaggtaggagtcatggagggttatgggcagaggagggacatgatgggcttctgtgtggagaacaggctgggggcagggagaatggagcaggggtgaagcggggagacccctgcaattgtcccagtgaggggtgagcatggctgggaccaggcaggggtggcgagaacgtgatggattctgggtaggttttgaaggtaaatccgtgatacaatggactttggggactcggggggaagcgtgggatggggaggcgaggtttagataaaagacaacatacatggtgcagtgtgatgggtgcaccagaatctcacaaatcaccactaaagaacttattcgtgtaaccaaattccacctgtaccccaataacttatggaaaaataaaataataataataaaaagaaagttaagccaacaggatttatgatccaacacagcatccgactccactgtataaatcttgggtctccaataggaaagcacagctccgaaggggtctgggctggtgagcgttgcaggctgaattgtgccccccaccaaattgatgtcctaaccccagtacttcccaatacagtgactgtattgggagatggggcctttaaccaggtggtcaaggtcaaatgaggtcacaagagccagccctaatccaatctgctggtgtaattacaaggagattaggactcagacatgtacagagggtcgaccatccacaagccaaggagggaggcctccgggaaaccaaccctgccaacaaatgatggtgtgtcccttcggggctaaaccccaagaggcctctgtgctctctcttactctcaggtccctgctcagccatgtgcactggcttgagctagcttgctggaggttgacaggcccatgggggaagtcatcctggtcaaaggtattctaggccagccagcacaacccccagcccacagtccaagctgtggacagatacaggagcaagtccagccaagatcagccaaattcagatcagcagaactgtctagctggttcataacttcatgaactataataaataatggttgtttctgttttaagcttctaaatgttgccatggttggttatacagcaataactaactgatagaccttcccagagcaatgtctttattggtactcccaccaccaatgtataagaacacttatctcagttactccctgacccatcctgaggaataactgcaaacttctgattttttagatcttcaagggtccagggtgggtgtgtagagactgcttattgttccccaacatctggtctctccttcttccatagtactagaacccttacattttagctgcatttcccagtctcccttgctgctaggtgtggccatgtgactaggttccaaccaatgaggtataagtagcaacatcatattgccacttccaggagatggactactgcattcagattctggttttgccacttctctgttgaggaactttggaaaggtgacttagtttctctggtgcatcagtttcctcatctgtagagtggggataacgatagtatctgccttatagtgttgtcaagaagtgaagtaacacaatgatgcatttagaacatgcttatggctgaatgtggtggctaacagccagatgtggtggctaacgcttgcaatccgagcgctttgggaggccaaggtgggcagatcacttgaggtcaggagcttgagaccagcctgggcaacatggtgaaaccctgtttctactaaaaatacaaaaattagctgggtgtgctggtgcacacctgtagtccctgctgctcaggaggctgaggcatgagaatcacttgaacccagaagataaaggttgcagtgagccgatattgtgccactgcaatccagcctaagcagcagagtgagactctgtctcaaaaaaaaaaaaaaaaaaaaaaaagaacagtacttacacatgggaagttttgttatgtgttgttatcattatcagtataataatactttcattttattttttgagaatgggtcttgctgtatcccaaggctggagtgcaatggcgtgatcatggctcactgcagcctcaaccttctgggctcaagtgatcctcccacctcagcctcctcagtaggtgagactacaggtgtgtgccaccacatctggctatttttttttagagttttttgtagagatgggatctctctatgtttctgaggctggtctcaaactcctgggctcaagcaatcctcccacctcagcctcccaaagcattggggtaacaggtgttagccaccacacccagccaataatacttttattatcagctcctaaggttgatgtaaggtttaaatatgaccaagctccatgtctattatcagaacaagttttcctgatgcttatttgtctaccaagaccaggaagaaatattaggaattatatccatccatctactccctcctccccagcaccaccccatgaggctcagtagattttccatttccttcgtgatacgtactcatttgcccaataaatctttttcaaagcatgaaaattcatagggggatctttttggcccaaatttcttgtaagagatgcctacagggaggtaaatgttcatttatagcttatcacctgttttacagagaggttgagaggtggaaagaaatggagggaaggaagaggtaggagtgaagttggcatttttcattgttgatccaatgtagcacacagacgttggtgtgagcagatgcatgtggaaaggaggaggagaaatttgggtcaggaaggaacctgagctatttttttctctcagtggtgggtgagtagctgttttaaggaaaaagaaagtggaaaaaaggaaataagagagtgaatgcctaatatataaatactcagaacttctgcaccctctgataagtaggaaccccaagaaacaagaagctttgggggtgaacggggtgtcgttcattcaataaacatctgagcacctattctgtgccaggcactgttgcagggtctgggaaccgagcaatgaacaaaccaaagtcttttaccatatggaaccaccactcctaatttctgggcatgatcagagaatgggatgaaatggagagtgaaggggaggccgcctcaacttcagtggtcagagagggccactctaagaaggtaacatttgagcagagacccacttggcaaagagaagacagttacataggtatctaaggaaggcattctcctttcatcaaagtgttcactgatgctttgcttagaagaattgacaacacccaagagtccatccttagaagactggctgaatgtatcaggattcaactgggtgagaaatgagttgaatatttgaatatggtaggagttctgaattacagaattaaatgaaaacaaacagaacaatcgatgacagcatatatgtgtactctcatttgtgttttctttaagtgagggggcttcaggggctttcactcagcagctatttacctactttcacagaaacatttcaataagttagcaacctatatagaagtagtagtgctctgctaattatcagttgtgtatataaagcgtatcagtcagttttgctgtgtaacaaaccactccaaaacttagtgacttaaaataacaagcattattagctcatgaatgtggccacaggggctaagttaaactggatagttctggcctcagctgacttcatgtgttcaactgtggtcagctgtgggctgcctggtccagaataaccttgtccgagatgactcgcctctcctccttgggcatctcatcctccagcaagccagctcaagccagtgcacatgactgagcagggatttgagaggaaaagagagcatagaattcttttgaggtgtgtgtgtgtatgcattgatcctcagcctcacttctcccatacatagaatgaaccttgttattattactcattccataataacaatgccagatgcctatcagccgcaaactatgagatatgcactgttgttattggataagttgtgataagtaaatttttttttttttgagacagagttttgctgttgatgcccaggctggagtgcaatggcacaatcttggctcactgcaacctctgtctcccgggttcaagagattctcctgcctcagcctcccaagtagctggaattacaggcacccaccaccatgccagcttttttttgtgtgtgtgtgtttagtagagacggggttttgccatgttggccaggctgctctcgaacttctgaccttggctgatccgcccacctcggcctcccaaagtgttgggattacaggcttgagccaccgtgcccggccagtaaataatattttattgatgctgagttgttagttatttacattttaatatttctcacattgaaatatgtcttacaattgttcatatctttggcttttcttcttttttccttacaaagttcttaacttctttattttataagcaatacatctgaaaggaaaatcatcacattcatggcatatcatagtcaggaagaaaaattaggttgcatcctgaggttgaccaaacataccagattcaccctgttaagtcctggtccccaaataaaacattgagcacttcctgtaagccggactccttagcaaaaaaaaaaaaaaaaaaaaaaaaaaaaaaatatatatatatatatatataaaatgattaccacatccagaaagtttgtgaactctcttcaaatatcagcatggcaaaactcacatatatatatatataaaatatatataatatatattatatattatataaataatatatattatataatatataacataaatatatatataatataatataaatataaatatctatctatctatctatctgagttttgccatgctgagatttgaagagagttcacaaactttctggatgtggtaatcatttaatattattaccgctttttttttttatcatgaaagaacaaatgtaatgttggtaagcctggtaatcttgtgattttttttcttttaaataccttttgtgtttttaacttgagaagactttatagacatatctatgtgcccacagaaaatatcgacattgttttatgtgttgctgggttttcacgtcattcatgtcagactgcatctgtagatttgcaacttgcttcccccatcctcccatgaaatgatgtgtcttggagaccttttcatatccatccacgatgatctattttgttctgtaaaatgagtataataacaacactcaaccaacatgatcttggtgaggacacattaagctctcaataaatgttacttgatttataatgattctgtctttggaatcatttttctagcgagactgcagaaaagccctgtgggctggaagtggctaggagaacctgtttctctaagcagacttgacagctcgctgcccttgtatgatttaccccatacacccccaagtgattgtatccttctaggttttaaataacaaggtgagttttcccatttcaatcatacttcttccccttgcaatcccaccttaaataaatggaaaattttttagtagtagtgaaacaagaaggtctttggggacatatcgctctgggtttaatcctggatatgccatttacaagctgacctgccccagggtgtccgaggctcccaaatgatcacagtttggagatggccacgtacactagatacatccacacaatgtgattaattccctgcagttgccaaaaagcatgaaatagattcctctccttgtgggatggtccctactgataggattccctgcttggtgccacagaaccctgccttatgggccacagcagatgtaccagaggatagaacaacaggtcactggcccatgaagtggtcttatggcaaagtcttactcaacaggggtctgtgatcttggatgtctcgatctggcagatcatagacttcatcctgccaactgacgagcacagttcagttcaggtcacgtcactcattttccttttaatttaatgaattaccatcattaaaacattgagatagtttacatttacaaacaccgtttttcattcattcgactgtttcaaaacaacattcatgggccatctggtatgtgccaagacacgttccaggttctggaggctcagaggtaaattagaaacacacagcccctaccatcatgggtctgtaccattttagaaacaaggcagacagtaagcaaaaagaaatattcataaagtaatgagctccagcttattttgagaaattgaaatatcaaaactcactgggccagcaactccattagaggacataatagaaagatagtgaagagccatatcacagtggttctaggtaaacaaagagctcaaagtcagagcctcaaagctctctggcccttgaaaagttgtgaatatcatcctattaggcatacaggatatgcttcaggcatactgggtgtcacctgcaatgtccagcacgtagtgagtgctttatgaatgtctgtctcttgagtgattgtggaagctgtgccttttctggtgaccagatcattgggaagaacacttattcatccattcaacaattccagagagatttgattttgtgaaggactcactcttgcagagggtgtacaattcaaaacccacataattcaagactaaccctgacaaaaagatggtgggtgtgtctattcaccagctaaagcgacactaaaataacagtcacagtttacaatgtatgtgattggttgtatttggaagcatgagaaactgtagccatgctgcatttctgtaaatctacaataacatccctcttgtgaccccagcttgcaacataaaaaatagcgctttgccggctgggcgccgtggcttacgcctataatcccagcactttgggaggccgaggcgggcgcatcacgaggtcaggagatcgagaacatcctggctaagacggtgaaaacccgtctttactaaaaatacaaaaaagaaaaaaaaaattagccgggcgtggtggcgggtgcctgtagtcccagctactcgggaggctaaggaaggagaatggcgtgaacccgcgaggcggagtttgcagtgagccgagatcgcgccactgcactccagcctgggcgactgagcgagactccatctcaaaaaaaaaaaaaaaaaaaaaaaaaaaaaaaaaaaaacctagggctttgccaataactcgcatatatttatatagccctctcctccccactccactgcttctcccaacccagaataaccaacagcctgaatccggggcatacctttctctgaatttcctttctgtactttccccctcttcagagctttttgggaaacttcatgttaataatttcaatccggttcagccaggccctgctgtcctaagaacaaaagctgtcacttaaaaatgactttgcagttgttgccctcatctgttttcatcccatgatctctacagcccagagatctttgtttccaggaaacagcagggctttccccaggcggatgggttctttgaaggagggggaaaaaaaaaagtcttctccagctattctgtgtagagcgtcagcaccaccgaacgctaatgcttgaatggtttagaactgcggacagctcacgccagacagattcagcaccacggacagcccccaaggcagctcgtgatgtgaatggttcagcaccgcagacagctcaagcctcgccggacagccctgctggaagtggttcagcaccacggatagccccgctaatatccatcagaaccccgggcggctcaggccagaatggttcagcaccacaggcagccccccaggctcgcaggacagttccccccagcctcgcagggtagcctgtgctgggactcttccggtatcacgaagagccctgctggactggttctgcaacatggataggaacaagtgtcatttcgccatcacctgtgctagatgtagacgctcttctgagctgattcctgagccccctctgcaactttcacctctggagactctgatggggctatctgggtaatccaggctcttctggagttgacctcagaaatgcaggcatccaacagttaatatgcccaaaagggaactctggattttccccacaaaataaacttgatctcacttagggcacttcagggcactcagttgctcaggcccaaagcccagaagtctcccttgattcgtctctttctgtcacacctcgcactccacccattagtgagtcctctcagctccacctgtagagcaaatcctgaatctacccactgctctccatccccattgccactgccttactccaggccaccgtcgcttctcacctggtttactgcaagagcctcctaagtgatcctcctactttaccgccccttctagtgcattccccacacagcagtttcagtgagccttggaaaatgtaaaccagagtctatcataccattcctcagtacctgccactatctccaatacacctataataaaattcaaagatcttcctgtggctttcatgactctggatgcctatcttttttttttccttttgagatggagtctcactctgtcgcccaggctgggtacaatggcgtaatctcggctgcaacctccgcctcccgggttcaagcgattccccttcctcaggctcctgaatagctgggactacaggcgcgtgccaccacgcccatctaatttttgtatttttggtagagacggggtttcaccatgtcggtcaggatggtcttgatctcttgacctcgtgatctgcccacctcaacctcccaaagtgctgggattacaggagtgagccaccgcgcccgggcgcctctctatcttacatcccatgacactctcgctttcctggtcacactggccacaccacctccctgttggttcctcagggcctttgcctctggtgtgctctgtccatggtgctgaactcattcaagtgtggattcaactataactgtctcctttccaccatttggtccttagctcaaaatatgaccttttctaaaaggccttccctgaccatccccacctaaagtggcttcaaagttactatcacagtgatttatttcacagaatttagtacttcacagaatttagcacaaactatatttcattttgcatttattggtttacttgacactgtctgttttcatcattagaatgtaagctccattaggccacagacatcagttgccttagctacccggaacagcatcttcacatggcagttgtttaataaatattagttgtatgagtgaatgaatgaatgagtggatgaattctcagccctgcattaatttttcttttcctggctagtcatggagccccaaaaagatgtcaacagcacttacctcctggtaaaattgtggtccagggtttgtgttggggtccccaagatcatccgcaggtttgatgatttcctgggaggaggactcaagagagactcagcacatagtcatactcacggctatgatttactacagtgaaagtatacaaagcacaatcaacaaagggaaaaggcccatggggataacacatctgtactccagcccttggcttgctatgaggctatggcaagacagagaatgtgttatgttacagtaggataatgaagaattggaaccaataattcaatctaccacacgtagtggtggcatatagctataattttttaatcgtgattttatttcccttttaggttatggcacttgaaactggctttccacttataggagtgctgtaaagtttccatttaaaggtacttcttaaatggttttagaaaatgaattcattttaaataaaaatattaagtaaataggaatgcagggatgttatgtgtaaatgaaagcaatcatgaagatgttactcattgctgcagaaacagggcaaacattgaaaaagggtgtttgagaggttgaagtttgagaaacattaaagacataaaacaggattccagacactttcccttcattgttttcttctgtttagggaagaaatcacctctaaggggtcactcagtaacattcctttcggccaggcactgtggctcacgcctgtcatcccaacactttgggtggccgaggcaggtggacgacctgaggtcaggagaccagcctgaccaacatggagaaaccccatctctactaaaaatgcaaaaattagctgcgcatggtggtgcaagcctgtaatcccagctactcgggaggctgaggcaggagaatcgcttcaacccgagagacggaggttgcggtgagccgagattgtgccactgcactccagtgtggacaacaagaacaaaattccgtctcaaagaaaaaaaaatttgttccctcagaattctggggaagcccctcaaacttgagtccattttgaaacaaccataattcatctggactatcaggatcataactggagatttttaccccatattgaggacctgctgttcaataattataatgataataccagtgacatttactgagcactcaaaattaggaggcatatgtattaacctatatgatgttcacactaaccctatgaggtagaaaatattattgtccccattttgcaggtaaggaaactgagaccgagttaattcacttcccaaagttatacagctagtacattgttagatctgcatctggatgcccagttcctaaccctctcaagactctgtgacctggggcagctcacctggtctcctgcactaaatgtcttgttatcaaaggaggtgatgaggattggatgaaatgtctaattcttgacacttcatctctcttctctgcacactctgaactatctttggaatggcaggaaactcatcttctaaacatagaaatgaagaaagtttcccatcccaattacataacctatctgaaaactcgtaggcaaacccaatctcagtccttccataatcttactgtgtgtcctttgtacaactcatttaactcctttgtgcctcagttctcttctctgttaaatggggataataatactaccactttgggctgttggaattaaatgagataatattaacgagatggctttccttgtagtatttttttgataaatgacagttatttttgtttttctgaataaccagggtaattcaattttctatccattagggaaaggaggttaaatccttacctcataccattcaaaaaaattccagaaggttcaaacaaaataaatatataaaataagactgtaaaatataagattatacaggaaaatgtgtttatgagagtaaggggaggccaggagaagtgattcatgcctgtaatcctagcactttggaaggctgagctgggaagatcagttgaggccaggagtttgagaccagcctgggcaacatagtgagaccctgtttctacaaaaaatttaaaaattagccaggtgtggtggcacatgcctgcagtcccagctactcaagaggctgaggcaagagcatcacttgaggccaggagttcaaggctgctgtgagctatgatcacactactgcactccagcctgggtgacagagtaagaccttgtctcaaagagacaaggagggggaggaggggcggggaagagagggagagacaaggctgaggaagggcatcttaagaccctaaaagcaaaaaataaataaataaataaaaaggatatcttgtatttttattaaaattcaaaacttcaggcactgtgtaaacacaataaaaacataagggaggagccaggagaaaatatttgccacagatagagtaacaggcaaaggattaatgtgcagaatatagaaagaatgtctattaatcagtaagtaaaagctacataaacaaatagaacaatgcggagaggaggagataaacgggtaattcacagaagagagaataagcctgttcaaatacatgtgtttaattctcctcactagtaatcagggaaatgtagctaagatgatgcagggacgccgttttccccctacctatggctttgccgaaaattttaaaaatttaatgtagcctccatgagagcaacttggctgtagtcactgcattgtaaatttgaacaacaatggtcattgataataatagcagctattaggcactgttgtaagaactgtacgtgtattacttattattgttattattgttttactttcacagaaatcctgggacttggtaaccataattattcccacttaacagcatgggcaaccgaggcacggaaatgttaagtaacacacccgaggactcactagtaacaaatggcaaagccagccgctgccccaggcggtcgggcctcagggtccccgggctgccaccccctgccccagctccttctcccttccgcccaccccggactcccggtttgcagactggagaaccacggggggcgtacgcaaagccgctggccttggggcgtctgtcgcagggtacctcgaacataacctacgtgctcatcagctagagatggaccagctcggtaccacacccccctgcaaccacgccgcgggtaccccgcctctgcggctcatccactcccttccccacgcgcctccaggtgcaggcttcccgggggtggaggaggggaggaggacacccacgctccccaattcccccacctcccatctcccacctccccccacccccccgcagcctccgcgtctgcgcagccgcagtcagtgcggcgccagctctgcagagcccagacagggtccggttggggagggtgagtccttcgagggacccccgcgggcgggaaggaggcggagaaaaggggctgggggcgcgggcggcgatccggggatgcgcgcgcgagtatggatgcgcagagggtgtgtgtgcctgggcgagggtgaggggcagaaccgctccagggatagggtccggggagagggcgtctccaagcccgtccggtgggagaggaccggggtctgtcggggtcgggtctgtttctccgcagcggaggtctgtgtcctggcttgggggttgcaggtgaattccagcctcctcgtgaggaggggagcacagacctgtgtaccctcgtggggcggcacgggcacgtgcgctcgtctcgctggggcttggtgtcgatgttcgctccccctggggtgttcagcgcacctgcccgagtgtgcacctgtgcgtgttcgcgttgtgtgtccgcctgggcccctgtggaccaccctgcaacggtgggagcgcaggctctcagcaaacaggtgcagcagccccgcccccactcttctgagctgtgtggctttgatcaggggacttccctgtctgttaaatggaaacctaatagtatctgtagcgagaagtatggccacctttatgtgagaaaagggattcgcagggctcagcagggctgggcacaaggagagttctgggctccgggaaacactgccggtatttttattgcttttactgtggttgctggttgtcgttgttgtgactgcgtctccattctctcaggggatgacttgtttgctatttcaccatgaacactgaggctgtggggtgtgaatctcctccccccaccatacctctgtctcatcccctttccttcttcctcctccattcactgcggatccagcttctcctgaccttgacctgatggctgtcgtctttcccatctgtcaccccgcttgcctgcattttctcctttctcatgccttcccctcccctcaacctagatccatgattaattatgtctcatattaaaaacaaagccaagcaaaaccccaaagcaataaacaaatcagaactccctaatggtactctctaacactctttcccacgaaggtcccataggaattttcttgccctgaaaaatgtctaggcagcctcctctcctcactcccaacagactccccggcccacactgaggttgcaaatgggcaaccccagggtctaattcagccccacaacttgtgctatttgactaaaggtgtcttcctgttaaacactggaaataattattgacatcatgaaatgtagaaaatgccatctgaaaatatagatttccagtcttcttttgagaaatcacaggatgggcgacaccagtcccatgcgtttgctctgcagacattagctgagttgcatggtgcagcttcttcagacaggagacctgatctctcttgccccactccccactgcctccgtcgtctctccccatgccatatatccactgccatttgttcatgtgctccttacaatagagaagtatttctctggacctatatttaattttcatttgtagaaaagtgacagtaaaagagtcctcttgattgactcattgattgatttttgagagagtctttctctcttacccaggctggagtgcagtggcacgatcctagctcactgaagccttgaactcccaggttcaaaggatccttccaatatctgagactacaggctcgtgacaccacacctggctaatttttaaactcctgggctcaagcaaccctcccaccttggtctcccaaagtgctaggattacaggtgtgagccacctcgcctggctgatttatttattaattcatgtcgtttcctatcccatttgttatatacaaatgtgcagactggagaatcatgtgtggctgtaggtgtgtatatgagtatgtgagtgtgtatgtgtgtgagtatgaatgtgagtgtgtgtgactgtgagtgtgtatgagtgtgtgtgttagtctatgtgagtgtgtgtgaatgtggatgtgtgtgtgtttgtgtttgtgttagtgtgtgtgtatgtgactgtgtgtctgtgtgtgtgtatgtgtggatgtgtttatgtttgtatgtgtgtatatgggagtatgtgagtgtgtgtgtctgcatgtgcctgcccatgacaatcactccctttccagctttgtctccagagcaccctctagcgtttgacctgctgtgtgctttatttgttccctgcctgtctctttgtctccctactagaatgtaagccccaggagggcaggaatctccacttgattactgctgtatttctaatgcttacagtcgtgcctagcccctgctggccctctgtaatgattcactgaatgatgaaatgtccatcagtcctcaggttctgaatcttgtgcctggagaaccagagaggaccctggagcaggaggagaaagagaagcttgtctcagaagctccacctcctcctggggcaatgcagagtctcaggcctgagcagacacgggggctgctggagcctgagaggaccaagactctgctgcctcgggagagccgggcctgggagaagcctcctcatcccgcctgcaccaaagactgggaggctgtggaggttggggcctccagccatgacagtgatgagaaaggtgagaggcaggggtcctttgggaggtgagtgggtggagaggaaggaattggcagagcctagggaaagactaaacattcactccttcactcatccattcaacagctattcatggagcactgtgtcagtcagcttttgctgtgtaacaagtcatccccaaacttaggggcttaaagcaacaatcacttatcagctcatgattctgtgggtcagaagtttgacctggcttcaggggacacttttcctgcctgtgcttgtctgtgcagcctcagagagctggtgaggccactggtcgatctcagatggctttacccccatgtctgctggtgctggctgttggctggcttggtggtgctgaggacaggccatgtgtctccagcaggatttttcagggttatcctcatgggggtgcttgcagggttctcagggatggcaagagagggaattccccaattttcaagcactggaagatttgaagaggaaaaacacatgatctcatttgcatttcaaaaatattcctctaactcagtggatttcaactgggcgtggtcttataccccacttctcctccccggacgatttttggcagtgtctggaaacatttaggattatcctaactgtggagatgctgctgttatcttgtggggagaagccagtagtgatgctgataaacgtcctaccatgcacaggacggaccctccccccacagaaagaatggtgcagctccaaatgccgatagtgccaagtttgagaaaccctgagtctcactgcatgtgagaatggattgtagggctaggaagtcaagaatggaaggtgggaggccagttaggagattcctgcaactgtccaagacagaggtgaggtaagtggagagatttgggacatctttgggagaaggaatcagttcttgctgatggatgtggagaaggggaggaaacgagaggtatcatgatgacttttagggttttggcccaaacagatggataaaggatggtgccatttgccgacatctcaatgacaccccatagcagaaaggggctgaaccttataccaactactaggcactgtctttttcctcaggggatgagcagggctgggacagaaggagtggataacagaggccagctctgctagtgaggcttggagctcctggctggggctaaggtgcagaaagagtggaaaatgccaggatttgcccagtctattcagcttagggatgagaaggacactaaggttctgactatggggacatgtccccactagtgtctgttctttggaagctggggaagcctccatcatcctggtttacttctgtggctttttcttctgctccttcactcagtttctgctgggggcctgtagagaaggaactcttttatctactggacaggtaagggactgaagactcaagtggcagggcacatcaggtgacccagttgaagttttctaggtagttatagaacagaattcaggtctttcattctctcagccccatctgaatcatcacataggcatatgtgtgtttgtgtgtgtgtggggttgtgtgtttgtgtgtgtgtgagagagagagagagagaaggagggtgagagagagagagagagagagagagagagaggaggctattactagaaaagggacaagatgccagtgggaagagcccactcctgccatctggccactcactcatggctcctttttcctccactcccaccctcacccagacctgtcttctcaagagactgggctttcccaggagtggagctcggtggaggaagatgacgaatcagagggctcccaggtacactggggggtttgttctttttccacaaatgtcccactctgtagatctcagcactttgtcacatttgcattctcagcttggaatttacctgccccataaaaatctcaagagatctcttgtgtctgatctctatggtgatcagacacagactggagggtctccatgtggtgtgtgtaactcagttcacatgtaccctccaacacttccttcataaatccatctacccatgcatccacctctgtacttcatcttctgtccacttattcatcaaccctcccttccatccaccctcttacctttccaatcactcatccattcattcatccacctctcaaacatctactagccattcactcatctgtccactctttcatccacctaaacttttattcacctacttgcttgtatacccattccatccatccatccatccatccatccatccatccatccatccatccatccatccctatacttcatctgtttatccacttatccatccatccatccatccatccatccatccatccatccatccatccatgcatcaacccatccctatacctcagctgtctatccacttttccatccacccataaaccctcccttccacccaccctctcacctttccattcacctgtccattcattcatctacccattgaacatccaccaactattcatctgtccactcattcatttacccaacctttcatcccttatgcatccatatacccattccatccatccatccatccatccatccatccatccacccattcatccatccatatatccagttatccatatacatactcattcacccttttattcagatgccatcaatccatctgttcaatccacccacctacatatccatcccctatccactcaactgtccacccacctattcatccctctactacctgttggctgtggtgaggatatggctagtatgcatccacccatatgcccacacattcattcatccatctgtatctattcacacacccagtcataagaccacctaccaatccattcacccatccacccactattccatttatccatccactaatcatctactgagttttaatccagatactacaagtaaaaccaaagacaattatcaaacacatttctttcactcaaaaacctaatgttttcttttttgaggaataagatatcaatataagaaaaccagtggttctttcatttatacattcatctcatacatgagaaaaatcacataatcactctcagtgagcacatgagagtcccatccatctcccaatcatgtcaggaatgtaactctggctgcctcaagccagaaaatggatttattggctcgtggtgcagggatgagggcgagggaaacaaactggccaacaaaccatgatagtgcagaaataagtgctgggcacagtggagtggcccaaaggaagaagttaactgcatgccaggaggtttattcttggatatcccagagaggaggacacaccacacctggagttttcgggatagtaagaattccacaggcatagcagggaagggaacaacatgtgcacaggcaagttggtataacaaggtacgtttcagggacactgaagttaagggcagagcagtgggaggtttgggtgaaaatatggctgggatgacatcattcactcattgcacgtctatttcttgagcacctgctcagtgccaagcagtgttcaatgcacagagtgtacaatagtgagacagaagtggtccctgccttcatggagctcacagtcaccgaggtagacagacgacaattgaaataagcagctaaaatatgaattgggttgagtggtgataactgctatggagaaaaatgaagcaggaagggggtttgggagtaggagctggggctgggggttgctattttaagaagcttgtctaggaaagtccccactgagagggagctattgagtgaggacctgaaggaggtggggagtgagactggcagatgtctagggagagcgggctctatgcagaggacacagcaagtgcaaaggccctgaggtacagatgtgcctggtacatttggggaacaccaaggggcatggtggtcagtgtggctggagggtgggagggaggactaggaggtgaggtcatgggggcgatggggtggatgatgtagtgtctcatgggccatggtgaaatgtgagttttactctgagtgggtgggagccataggcgagttctggacagaggagggacatgttctgatttggcctttagcaggactcctctcactgctaagtcccacaccgaggaggttggatgtgttttgcaggcagtgggagccatcgaaggtgttcggggacttacagaatcactctgggagcccatgtggaaggaaggtgggttggatgtggctggggttagagtttagaggggcaaaggagcaagtcagaaatgtatagttagggaaaaaaggtagaaatgaaacagagaagagttgccactttccttgtgcatgttacaagcttcatgctattctttttattttttatttttttgagacggaatctcgctctgtcaccaggctggagtgcagtggcactatcttggcttactgctcactgcaacctccgcctcctctgttcaagtgattctcctgcctcagcctcctgagtagctaggactacaggcgcacaccaccatgcccagctaattcttgtatttttagtagaaatggggtttcaccatgttggccaagatggtcttgatctcttgacctcgtaatccgcccacctcggcctccgaaagtgctgggattacaggcatgagccacgacgcccagccagcttgatgctattctaagctcatcttattataacacatctagtaactgaacactcattaactctcataactcatgagccttgtgagattgttagcatggtttcctcctctacagatgaggaaactgaggcagagaggaaccaaatggcttgcttcaggtcccacaatgagtgggtagcagagctagcatagagtttgggcttggaggggaggataggagcgaatgggacccaggacctgatgacatttccagacctgtggaacgtaaaaggtgaaggaacagggacaagcccaggggcaacacgtgaattctgatgtggggacagggtagagggaggttctagcctccagcatagggatcaaggaggcagtttggaagaaatgacaaggtcgattttagacatgctgcttgggagaggcctctgtgacatcattcattcactcactcgtttgcccagttgtaattccttgagccagcattgatggagcacacaccagggggctgataggggagggcctctcattggcaggccctgggtcagttttctgcatggacagaccctccttcctgcagacaaccaccctctttcaaaaaagaaagaggagcgggctgtctggaaccagagacctttgatgacagttacagcctcattatgggccaggagctggactttgtgctctacttaccttaatttacttggtactcttatcagtccttgatgtaggacctgttatcccattttacagatgggaaaactaaggcacagagaggttatgtgactttcccttgtcatgcaacgtgtaaatggcagagctaggatttgtacccagcatgtctcttaaccactaggtgtcctgcctgtgcttggggcagagatgaaggcctctctctccctgttctcctagtcactatacctcctgtggagaggagtgagtgaagaagtggaagaaagaaaaagagttactttccgggagggcagaagttcccagtctgtgggcacagaagaaagcaagcaggggaaaatggtcccatcattaccgttccataaaatgcaagcatatgtaacacctgcaaatcttatctaagtgcatgagattttaaaaagatcaatgcccagaaataacccctggtaaaagttgctgtaacaggccaaattcatccatagtgtgagaagttggggtagtggttacctttgaggtggggggatttcggggttgataatgatctgcttcctgtttggggtgctagttacatggtgtgttcaccttctgaaggtgcctcaggctgtacacctaggatgtgtgcaacctcccctttctacattccacttcaacagaatgttttaagctggctgggcacagtggctcacgtctataatcgcagcactttgggaggcagagtcaggcggatcgcttaaggtcatgagttcgagatcagtctgcataacatggcaaaaccccatttctactaaaaatacaaaaattagctgggcatggtggcacatgcctgtaatcccagctactcaggagactgaggcaggagaatcgcttgaacctgggaggcagaggttacaatgagctgagattgtgccactgcactccagcctgggagacagagtgagactctgccaaaaaaaaaaaaaaaaaaaaaaaaaaagttgctgtatatatccttgtatatatcctgccaaacatgtttccctatatactgagactgaattgagatttgtgtgccagtgcttgattgagggttgtgctctcaggtgaagcccagcggggagtgagggaagctggagaggggaggagagggagccaggcaaatatactggtagaactgaaatccagtctccgtcttatcgcaagggaaccctggaatgtgaatagagagttgtcctcctctgggctgggcgcagtggctcacgcccgtaatcctagcactttgggaggccgaggtgggtggattacggggtcaggagttcaagaccagcctggccaagacggtgaaaccccgtctgtactaaaaatacgaaaattagctgggcatgggggcggatgcctgtaatcccagctactcgggaggctgaggcagagaattgcttgaacccaggaggcacaggttgcagtgagctgagattgcaccactgccctccagcctgggcgatacagcgagactctccttctcaaaaaaaagaaaaaaaaaagagagagagagagagagttatcctcctctgagtcagtggagtggccttttgtatcccatatgagttattgttggctgtggactgccctggagggcgaattaacctcctgggtaatcctctaggaaggaggatctcattagcaaagggcatttgtcagaagagaaggagcaactacaaactgtaaaccatacaagtagcggccaatacccctagcctccaggggagagctgcaccagcctgaaaaacagaaataaagagaaattaggtgaggcatccatgggtctattatgtgtgatgtgtgtaaaactattggatttcagattacctgtatttattacattttcttaactttatattctgcttttcaaaattgaagtataattatttccaataaaatgcactaaccagagagtgtttacacatgtacatccgtgtaaccaacaccccaatcaagatattgagtgctgtcataattctagaacattctcttattttcccttctggtccatctcactccccagccctggaagcaactacagttcttgatttccacttgcatggattagttttgcttgttgttgaattttatctaaatactgtcatgtagtaaactacatatatattttttaattccaaaaaaggaaattatggcaaaattgttattcctccagttggcattttcacttaatacgtgctggacagttttccatttaatatatattgattatcttcattgtatttcaaagttactttttcctgctgccaaatattctctagctcagttgtgtcagacccatttccttgggtgatgaattgctaggctcccattgctgtcactgttacagaagacaatgctacaatgagcgtttgttcagttggcccaattttacgcatggattatgaggaactttataaaaattcacattctctggttctcctcagatacactgaaccagaaaatccaaaggggatcccaagatattcaaaaacctctcccaacaacttttggtgctctaccaggtttgggaactgcttaagtgggtcattgtccctaggtatctggttgtaaaggaagatttgaaataaggtgtcatccagagggaatcagcaggctaaagggaggaatttgtttcaaagattataaatgtgaattccatcaatgatttataatatactttaataattcgtagtctgtgtccttccatttttcttttttcacaggatttttttcagtgttcaccattgcctaactttccagataatccattatgtcttgtacattcaccaaacttccttgatattttaatagcaattgcactaaattcatcattaatttggaaaattgtcatcgttaaacattttgtcttctcatctcttatcatggtatgttttttcatttatgaactcattcaacaaatatttacagagttcataccctgttccaggcactgggaatacagtagcaaacaaagcaaaggtttgccctcttggtgcttacagtgtcattggaggaagagacaataaacatacatagcatgtcaggtggtgataggagcatggagaaaaagacaaggggcatgcatagtgcagggttaagggtatctggaggaagggcattccaggaagaagaactcgtaactacaaaggcttggaagtgactgtggctggaacagagtgagaaaggcaaggaatgacgtcagcgttagaaggagcactctgactggcccatgggcaagaaattgggtgggattatcaagacaagaaacaaaattctgtatcaagagtacaagatagatgacagtggctttggccagggtggtggtagtgaagggaagggaaatggtcagattctgaatgttttgaagataaagccaacagtacttgctgatgtcttgaatgtgggtggtgtcagaaagagagtcaaggatacaacaattggaggtctggaggggcctgaaggggtaatgggaggaaaactgcatgaggagcttttttttgtgggggacattacaatatttgtttggggacatgtgaagtttaagatgtccatcagatatccaactggagatggcaaataggcagtgagatatatagttgggtcaacaaatacacatacatatgcaagcacacacatatctcttgagggggtggggtcattagagcatagatggtatgttaaaactgagatttaatataccagtgagattttgaaattgtcatcccattattcgaacatttcctctgagagagcatagttatgttacattcttttgtttatcttatatctactcagttgtaccgttttaaattcaaacagcttttctcttgatatgacatttcatttctgatcatataagtctattttcctgcaagtaacaatggtggccccttcctttccaatatttatccttttccttttttctgtttcagggctttgtggagtggtcaaaagctccacaacaaacaaccatagtcttggtagtgtgcgtgctttttttgttcctggttttaacggggatgcctatgatgtttcacatttaactataatggtggctgttgttttaaaagtttaatttaatgaaatagatgccctatgtcatgttaaggaattgtgctagttaaaaatcaggaataggtgttgaatattttcaaatgcctttcaaacatcctttgagatgatttttaaaaaatttttggtgtgagttttcacatactttatttccatgaaatgaagacatcattgattgtaaaacattattttgtataccacggagaaagaaaagtgctaattaatcattaagatgccaccaactggaagatatctcctgactttgagaagatgaaaaaatgtgcaactgaagatcaatgaaatctggtacatttcctaacatcaaaccaactttgcattcttaaggttttggtgcaccagtcttttcatacactagattatatttattgatattttatgtaggattcttgcctctatcttcacatgtgagattggtgctatctttgtgaagttttggtatcatggttaagcttgcatcatagaaagacttgggtaacttttaccttttctatgcttttcaatagtttctgtagcttaggaagtatcagtcccttgacaccttacatgaattcattgttataaccaggtcatagagtcatggagagaacgtttcagctaattcttgggcagctttcttagttctttacaatgttatcagtttattaatactttttacctcttgcatttattttggcgaattacagaggtttttgtttttttttttttttgagaccgagtctcactctgtcacccagtctggagtgcagtggcgccatctcggctcactgtaagcagagggttcatgccattctcctgcctcagcctcccaagtagctgggactacaggcgcccaccaccatgcccagctaattttttgtatttttagtagagacggggtttcaccgtgttagccaggatggtctcgatctcctgacctcgtgatccgcccgccttggcctcccaaagtgctgggattacagatgtgagccaccgtgcccagcccagagttcttttatcctctagaaaattcttcattccatagagctttttcatattattagcttaattatgcataatgttttataattaaaaatttctctttattttgttctatcccctgtttcctgtaaactgctgtttgtggtttactcgttattagatttgtcaaaggtttatctagcttactattgtttttccaaagaaccaacattaggattcatttatatccattatttcttttatttgtaatttgtttttctttgatatgtattgcatttattttttattgtttttcttctttgtctcagtttttatactgaatacttgatttatattctctttatattttctataatagcatacttattaacgcaaatgtacttctggatatagcgttggccacatcttaacatttgattattcatttttgtttatgttgtctaaaaattacattgtagtgtgtctaaatattacattgtagtgtttctaaagagtgctttgaaactcagtgatttggtttattttttgtttaaaaatagttttgttttcttgttttactgcactgtgaacacagaatgtggcctataacacatctgcttccaaaactttttaaaaagcttttagtgtggcctagaacatgtccattttttgtaattgtttcacgaacatttaagatgaagatatcttctctgtctgtagaactgaaaactttatgtgcctgttagttaactcagtatcgtcaattatattgttcagattcatgtgttatctaattttggcctattatattcattaaaaaccaataaggttatgtgaaactttgttagtacaattgtttttgctaataaatttttataatctttgctttatgtactcaacagctgtgtaattcgaggcatataagtgcagcattgttatgtccttgttaattaaataatatatgtaaaacaccatatgacaatggctggcagatagtaggcactcaataaatgttaattaaaacctgattctgaatcctttgttaaatataaaatgattgttttcagtcaatttaatcctttgccttaaattttaccttgtctaatactggttgatattatcatcctgcgctcttctgtctatgtatatgaggttctttagagaaattaacagggaaaagtatggattatctctccattcctctctcaggctgattgcctgcaacaagcaaccagcccttaagagaaaggaaaacaggccttaactattacattttttgagattctactggaaataagagaagctcaattcaaatgagcttaagcaaaataataataataattattattattattcgttcatgttacaccaaagtttaggataaaattggctttatttacagctggttctgggggacctaaaaatatcactggggcttttcctctcctcacctccctctcttccttctacatggctggagacagctatcatggaccctgtgatcatctcttccacacggcaaggtgggagacctggcagattcccatcacgcacacctgcaactcgcatccttgttctgccttggggacaagagtcctgaaattaggggagagagagcagcaactgcaaaggccctgagacataaaccgactgcccaagtaaaggatggagaatggactgcagcaggtcaaaggcggaagcagggagataagtgtggagactgtcttaggtgtccagtcaacaggggatgggccgggcatggtagctcatgcctgtaatcccaggagggaggccaaggcaggaagatcacttgaggttaggagtttgagaccagcctgggcaacacagtcagaccctgtctctacaaaaaataatagtaataaaaattgtcaggcatggtggcatgcacctgtagtcccagctactcagggaaactgaggcaagaggactgcttgagcccaggaggctgagactgcagacagccatgatcaggccactgcactccagcctgggtgaaagagtgagaccttgtctcaaaaaaaaaaaaaagcacccaaaaatgaaaaataggggatgatgttggggggctaactgggctctgattagctcagacagtgccacaggtcttgactgattttgtggaatattgaaaataatcatggccgggcatggtggctcacacctataatcccaacactttgggaagccaaggtgggcagctcacttgaggtcaggagtgcgagaccagcctggccagcatagtgaaaccctgtctctactaaaatacaaagaaattagctaggtgtggtgggcacctgtaatcccagctacttaggaggctgatgcagaagaatcacctgaacccgggaggtcgggaggtggaggttgcagtgagcagcagagattgtgccataccactgcactccagcctggtcaacagagcaagactgtctcaaaaaaaaaaaaaaaaaaaaaaagaagaaagaaagaaagaaagaaaaaagaaaaaagaaaagaaaagaaaaaagaatcatgatactatcagtaatataaatcacattagcaatggtcttctaattagctctacagtatgccagggacctaatttcattgacgacagaagtatccactcaagccactgacgttccattctctacccgacagctggatagatcccattaaaacataatcaaccagattgggcaacatagtgagaccctgtctctacaaaaataaaaataaaaatattagccaggcatggttgtgtgcccctgtagtcccagctactgtggaggctgaggcaaaagggtcgcttgggcccagaagttcgaggttactgtgagctacaactgtgtcactgcactccagtctgcacaacagagagagaccttgtttctaaaacaacaacaacaataataataataataataataacaataacacaattaggaccattcataatcctcccatttcaggtaaagccaaagtcttcacaatgccatccagccctattccaagtggcttctcttccctcctccttatcttgctccctcccacgcagccacactggcctccttgctgtttctcaaactcgcctatcatgcttacttcaggacttttgcactgttcctgctccgcggaatgctctttccccagaagctcccatggctccctcatctccttcaggtctcaaatgtcacttcctcacagaagccttccccgaccaccctcaagtagcacctctctccgcaggtcccgctctactcgtcttcacagattgtatcatgacctgacaagtaatgggtcaatgcagttccagtctagcgtcctcaatggccattcctgccccttgggtggttctccctggaggaactgtgaagatggaatggggggaggagagggctgtggagttcaggttgtgcctccccggaactcctcacacatccataccagcttgtggcacctccacacgaccccacccccatgctcttgaagctgctccgtctcttcctggctttttttttttttttttttttttgagacagcatctcgctctgtcgcccaggctggagtacagtggcgcgatctcggctcactgcaagctccgcctcctgggttctcgccattctcctgcctcagcctcctgagtagctgggactataggcacccgccaccacgcccggctaattttttgtatttttagtagacacggggtttcaccgtgttagccaggatgatctcgatctcctgaccttgtgatctgcccacctcggcctcccaaagtgctgggattataggcgtgagccaccgcgcctggccactctgtctcttcctttaacagggcaggttggaccagggtggtatttgaatatagtatctagggaacactgtgtagggggaaataagtactagaagttggtaaatacggcaaatctaaaatcacagggattaggccgggcgcagtggctcacgtctgtaatcccagaactttgggaggccgagacaggtggatcacctgaggtcaggtgttcgagaccagcctggccaacatggggaaaccccgtctctactaaaaatacaaaattagccgggcgtggtggcgtgtgcctgtaatgccagctactcgggaggctgaggcaggagaatcacttgaatccgggaggcagtgagctgagatcaagccagtgcactccagcctgggcaaaaagagtgaaacttcatctcaaataaataaataaaatgaagtaaaatcacagggattaagtggaccaccccttgggccagtcatgtggcctgtggttagtaattctcatagtgaaatagcccgattacccgcgagatggtttgggagggattaatgagaaggctgcacgctgccaccagagggcagcttcggcatccagtgctgtgagggttcacagaatcctaggtccatttcctctttaccttatctgtcaatccttacatttcagaagctcagaaatattttggataatttttcctccacggactcagaggactctaacctcccgggtgcttttctctttctacagcaggaggggttcatggcaaattctcatcacccctccctattgctgctctgccactgaacaggcgctcacggcagaccaatctgcccacacccaagacactttccagcggcgccgcccatgggcgtccctgctccgcgggaagctctcaccggcggatgcagcccgacgcctgcgcactggagaggcgccaagccccctgcacctgcgcactccgactgggcggggtctcctcgacgtcctggtggaagggttcggaggacggacgccgatcatgcccactaccacgcccccagccctgccagttccccacagagcgggtttgacccagctctttctgctgctctcttgggtgataaactgtgccccatgtctgtaaactagggtagcatttcacgcattcatcctttcacccggcactgtctgagcccgtactgtgtgtcgaggcctggactgggcgaagttcggctctctgtggtccctgattctgaatggctctagggctggtgtgggatgttcaacttactcattcggtcactcagcttttcttgaggacctactgtgtgctgagaccagggctgagcaaagtttgggtcacaggaagaaaccagaatgattggtccctgaacctgtgggctccagggctggtgctgaggatgttcacctgttcatccatttacttggcctctcctgaggacctactgtgtgcttggcctgggctgggggatgtcgggggtgagggggttaaggagaaactaaatgtgtggtccttgtccctgaatgactccggggctggtgctggggatgtataactcttcatactgtcactgacaattcttgaggacctactgtgtgctgaggcctgggtggtcagtcaggagccaagggaagaaccaactgcttggtccctggccctaaagagcctgggcaacagagcgagactccgtctcaaaaaaaaaaaaagaagaaaattctgcatatcatatgctaccatttgtgaagaaaggtgtactatatatctttccagaatattctatgcatataaatattcatatatatgcttacatatagtaagcatttgcttctagtgagggggacttggtagctgggagacacaggagtaagaacagtttttttttttaactttataaattgtggactacatgagtgtattcccccataaaataattttccaatgattatagtcatgtgaagttatgagattataactttaattcaacattgtagtaggtggattacgttcataactcctacttttcacccttccctgggaccacatgcttaggaaggctcttcctgtgctgatcctaggcttggctaggaggcttgctttggcctgtgggactagatgcaaatgtgacaatatcagagacttgaaagcatgcctgtgtgtccactccctctcagactcctgccacctccctgagaacacacccaggtgagatgtgagtcaggagaagaagatcaaattggcccagctgagccctcctggtccaggtccagaccaagcctggtccagaccaacagaaccagcagctgacctccagatgcatgagaaatagtaaatggataaatgagggctggatggtttgttacacagcaagagctgactgatacaagcattaaagtcaggtctttgagttagggggaaaaatggtggagatgggtaggtgtttcctcatactgaaaaaaagactaggcccactctaaaaatcttttgtagaggagaagcactcccttcttctagaataactttcagctctagatttctcctgctcattttctctaagcactatttctatcttagtgaatccagatttcttcttcagactctgctcctttagtaaatatgccaacttggccaaagaaaccaaaccttttattcactttaattcaattaaatttactgagcaagggcttactcaataaaatcaacaatgaaaaggccagctggccaggcaccgtagctcaggcctgtagtcccagcactttgggatgccaaggcaggcagatcgcctgatgttaggagttcgagacagcctggccaacatggtgaaaccctgcctctactaaaaatacaaaaattaggctgggcgcggtggctcatgcctgtaatcccagcactttgggaggccgaggcgggtggataacgaagtcaggagatcgagaccatcctagccaacatggtgaaaccccgcctctactaaaatacaaaaaaactagtccgggtgtggtggccgggcgcctgtagtcccagctactcgggaggctgaggtaggggaatcacttgaacccgggaggcggaggttgcagtgagccgagattgcatcactgcactccagcctgggcgacagagcaagactccgtctcagaaaaaaaaaaaaaaaaaaattagccagactcctgtaattttaactactcgggaggttgaggcaggagaatcacttgtacccgggaggcagaagtttcagtgagccgagatcgctccactgcactctagcctgggtgacagagagagacactgtctcaaagaaaaaaagaaagaaattaaaggccagccataggtgtttctgcaggtctacttgcccgtgccccatttataattttgcaccaggaagaccgcaggggagtctggcagatgtgaggtacagtcttagccctgtgtcttccccactgtgtgccctcaggcaagttaacaagcttctctgagcctcggtttcctcacaggaagcgtcggggataacacagtatctcccccatagcattgtgaggttggaaaggaggccctcagctcttaatcttctgctggtccacgcgggtttctgccagggcacccctgttgacaggtttctcctccctgtgagagcccaggtgttgagtcaggcgtgggagctgggcaaaggcgtcccgaactgtctgcatgcgtcctctggtgtcggatgagcgcggaggagaagctgaaggccttcccgcagccgctgcactcgtagggcttctccccggtgtgcacgatgtggtgctggatcaggtaggagcggttgctgaaggccttgccgcactcggggcaggtgtagggccgctcgcccgtgtgcgtgcgctggtgcagggcgagcgaggagccctggctgaaagctttgccgcactcgccgcacttgtagggccgctctccggtgtggatcttctggtgctctataagcgaggacacgtggctgaaggcggccccgcattgcaggcacctgtagggccgctcaccggtgtgcacgaggcggtgctggaggaggtgggagcggttgctgaagcgcttgccgcagtcgtggcaggggtaaggccgctctccggtgtgcgtgcgctggtgctgcgtcaggtgcgacacctgggtgaaggccttggcgcactggccgcacgcgtagggcttctcgcctgtgtggatgcgccggtgctcggccagagaggcgctctggctgaagagcgcgccgcagtcctggcacgtgtagggcttctcgcccgtgtgcacgcgccggtgctgggtcaggtgcgcgatctgcgcgaaggccttggcgcactggccgcagcggtagggcttctcctccgtgtggatgcgctggtggcggatgagcgctgaggagaagcggaaggccttggcgcacgcggagcactcgtagggcttctcaccggtgtggatgcgctggtgctctatcagggacgagcggttgcggaacgccttggcgcactgggcgcacgcgtagggccgctcgcccgtgtgcacgcgccggtgctgggtcaggtgcgtgacgcgcgtgaaggccttgccgcagtcggcgcagcggtgcggcttctcgcccgtgtgcgtgcgccagtgggacgccaggtacgagccctggctgaaggccttgccgcactcgtggcaggcgtagggcttctcgcccgtgtgcgtgcgctggtgcagggtcaggtgcacgctctggctgaaggccttgccgcactcggggcacgcaaatggcttctccccggtgtggattctctggtgtaagatgaacgctgaacagtagctgaaggccttcccgcagtccccgcatttccacggcttcttggggcctccacctctctcccgctggcggctgtcaggatgcctctccttcgggctctccccaggcgcgctgcacctccgggaactgctgtcgtcggggacactggcttgggtagcagcagggctcgatatggttcttgggattcggctgaattcatcgcgttcctgcatgctgtccccagcagggtctcccttgcaggccacggcctctggctctggacagctttcctggttttcctgcaggtcctcaacctggccctcgtgtttccagtttccttccaactctgcgccctggagggcgacgctcaagagtccctccatcctcgatccctgggctgctgtcttgatctcacatcttttctctgggtctgaaaagaaaaagatagaaaaaaaaattaaatgttgccacttgtcctgagctggaaaaatggctaacagctgaactggtaagaacttagcatggggtccctggacctctgtgccaatgacattttgggtccaataatttggtgtggtgggacccatcctgtgtgttgtgagatgttgagcagcgtccctggtctctccacactggctgccagggacactacccctcaacccctgagttgtaacaatgaaaaatgtctccaggccggacgtggtggctcatgcctgcaatcccagcactttgggaggccaaggcaggtggttgcttgagcccaggagtttgagaccagcaaactgtctgctgcctgggcaacacagcaagatctcatttctacaaatgaaaaaaaaaattagccaggcatgatgttgtgcacccgtggtcccagctactcaggaggctgaggcaagaggatcagctgagctcagaaggttgaagctgcagtgagtagtgatcacactactgcactctagcctgggtgacagtgtgagaccctgtctgaattttctttaaaaagtctccagacactgccaggtgtcccctcccctggggacaaaattgcccccagttgggaatcactgacttaatggaactaaaaacaaatttaaaagatccctgaaaaagaaaaaaaaagcatgaatctgtcagctcttaaaatatggccctgtaatctggtgctgtgaactgaattgtgccccctcaaaatttatacatggaagccctaactcccaaggtgatgctttgtggagatggagcctttgggaggtgattagctttagagggggtcatgagggtggggcccccacaatgggactgttttattttttttttgacatggagtcttgctctgttgcccaggctggagcacagtcttggctcactgcaacctccgcctcccgggttcaagcaattcttctgcctcagcctcctgagtagttgggactacaggtgcacgccaccatgcccggctaatttttgtatttttagtagagagggggtttcaccatattggccaggctggtctcaaactcctgacctcaggtgacccacccaccttggcctcccaaagtgctgggattacaggcgtgagccaccgcgcttggctgggactaatgttttgataagaagaggaagcgacaccagagctcgctgtctgtcaggtgaacacatggcaagaaggcagccgtctgcaagccaggaagtgagtcctcagtgtggtctgaccatgctggcactctgatctcagactcccagcctctagcactgtgaagaaataagtgtttattgcttcagccacctaatctgtgattttttttgtaagctggagctaagataactggaaagacagttttcttttctggggaaaaatcagttgaaactttaattcccagtgtgacagcgtttgatgtggggcctttggaggatgattaggtcatgagggcatcctccttaataggattagcgtccttataagaggagacaccagggggctcacttactctctgctctctctgtcctctctgcgtgtgaggacacagggagaaggcggccatctgtaaaccaggaagagagccctcaccagacagaatcagccaacagtgatcccagatttcacattatggggacactattcaactcactatgctccccttctacagggctccatcagtgaaggagctgcccagggtctcccaggctcagaggttcatgctggctcgtgggcccagggtcgttagagatggtgatctcaagctattgcaggttaccctgtctgctttgcacattttcagtggaaagcagggatctgtttttatatgagcccaggaagtcactgttttttagaaagccataacagaagccatacatatagttacttctagtggggctgtgatgctgaaggatttataccaattgcctggtgtacactggacctgcacgctggcgagaaactcaccactgacttctgatgctttagttctaacagaatgggaagacagatggacaaatgacctcctggtgctgagagagggaaggaggcagctgcctgtggatccactgtgctggggctagccccagaggagggggctcacactgctgggaggtcctttccaggctgtgtggctgcaggtaagtggctacctgctctgaggctctgcctggttttctctctctaaacagggctccagcctccccttctcccgagggacatggcaggtctctcagcaagcttggcctcatgttatgtgtgggctcagcccctcacacacaggcattccctgaaccaactagtaggctgtgtgcatacagcagagagtgctcggcctttggctcctccgggtacactcctgctgctgctggacaggctacgtctgaagcttgtcctccccacttcctgtgtgagatcctaaccctttgtggtggtgctaggaggtggggcctctgggaggtgatgatgacatgaggctggagccctcaggcgttggattcctgcccttataaaagaggacccagaaggctcccttgccccttcctccaaatgaagacacaacaagagggcccggtctatgaactaggaagcagccctcaccagacaccaaacctgccggcaccttgaccttggacttccagcccctagaactgtgtggaaataaatgctgtttctttctttctttctttttttgtttttttgtttgtttgttttgttttgtttttgagataagagtttcgctcttggtgcccaggctggagtgcagtggcacaatgttggctcactgcaaccttcaccttccgggttcaagcgattctcctgcctcagcctcctgcatagctgggattacaggcatgcgctaccatgttcagctaattttttgtatttagtagagatgaggtttcaccatattagtcaggctggtctcaaactcctgtcctcagatgatccacccaccttggcctcccaaagtgctgggattacaggcatgtgccactgtgcccggccaataaatgctgtttctaagccaccagagtatggcattccgtcacaccccaaaggacctaaaatagggctttttttttttttttttttgagacagggtcttgctctgttgctcaggctggagtgcagtgttgcaatcatagctcgctgcagcctgggaatcctggctcaagtgatcctctcacctcagcctcccaaagggcttggatcacaggcaggcaccaccaaccacacctggtcaagacagggcttttgtgtgggctattctttctgcctgacatgctcttcccgcagcgtgtgcctcagcaagaggacaagaggagaccctgagggagtgatgatgtttgtgttcagggtggagaacacagcaagtgcaaaggtcccagggcaggatggtgacaagggtggcagaggaaaggtaaagggggtggggctggacagagcaactgaggtgcaaggcaggggagatgcggtagagtggggtgggggtcagctcacacaggaagtcacgtgtgctggtaagaacttgctggtgggggccaggctgggtcggctcaggtgccacgtccaccggcatccccggagtgtgcaggggtacccacctcgtgtgtagggggagggcaggtgggttcacagcggggttgggtaaacctgggtgttgtgcacacacaaaggagcccaaggggagacacaggcttgcttgggggcagtagaagaaagctgtctactcccagcacttctgacacgtgggctttctccacaccaacaaccaagtctccaatctgctctgactgggaggcacaggcagctaccaaccataaaactgcctcaacccctccttgggtttggtgatttgctcacatagctcattgaactcagggacatgctttatttacggttactggtttccaataaaggatacaactcaggaacagccagatggaagacacacagggtaaggtataaggaggagctcagagcaccatgccctctctgggtgctcgacagccccagagctcggcaaaccctaagtttagggtggttatgggggttccatgacacgggcgtgactgacataggtgtgatgacactggccatcggtgatgaactcaacttccagccctctcccctcccaggaggtaggggctggctgaaggctggaatgctcatcagggctagctcccgtggcaaccagcccatcctaggggcctatcaggagtcctccattagcataaatgtacttgggggtctaccaggagtcctccattagcataaatgtacttgggggcctatcaggagtcctccattagcataaatgtacttgggggcctaccaggagtcctccattagcataaatgtacttgggggcctatcaggagtcctccattagcataaatgtacttgggggcctatcaggagtcctccattagcataaatgtacttgggggtctaccaggagtcctccattagcataaatgtacttgggggcctatcaggagtcctccattagcataaatgtacttgggggcctatcaggagtcctccattagcataaatgtacttgggggcctaccaggagtcctccattagcataaatgtacttgggggcctatcaggagtcctccattagcataaatgtacttgggggcctatcaggagtcctccattagcataaatgtacttgggggcctatcaggagtcctccattagcataaatgtacttgggggcctaccaggagtcctccattagcataaatgtacttgggggcctatcaggagtcctccattagcataaatgtacttgggggcctatcaggagtcctccattagcataaatgtacttgggggcctatcaggagtcctccattagcataaacacaggtgtggttgcagggggcttattaagagttgcagaagacactccttctacccctgtcactcaggaaattccaagggttttaggggctctggtaccaggagctggggataaagattaaacatatatttcttattatatcacaagatcacaggaagacacatgcattacatcacactctgacacacacagggtcatacacaatcatacctgcccagacacacacagacatgcagagacacccaaacccatatccagggacacacagtcgccctcctaacccccatgcaaggaggcaggtgggaagccatcacctgcagccacactcacacatgcacacagggtcccgggcacacgtagctacacacacacccagccccacacgtagctccctgtgtgaagaggtgcacagagacgcacaaggtcacacatgccacctgctccacacaggccggccattactgggacacacccacaggggatggctggacacatgtgcagtcacactcggtggatagagctccagcatagccaaagcccacatgtgcagcgtctccatcatgtgcagatgcacacacttcagacagcacggcactctacaggctcgcacagccaggtcacccatcattgtgctggcaggcacacgggccgagccagcctacacggcggcacacccagacatgcacacgtggggtcacacacctcacatccaggagaactttcagacttgcccaaaggcagccacacgtgtatgtgacatgctgtgatatgcagacaccgcttcacatgaacgagcacataacacaccgataaagtgttacatgcctttacctgcagtcacctgcctgggctggcaccactgagtgagcaggtgcagacacagtgacactcggggacgggctcacaggcagtcacacacctgcaaggcctggcaccgccgagtgagcaggtacagacacagtgatgggctggcaccgccaagtgagcaggggcagacgctgtgacactcagggacgggctcacaggcagtcacacacctgcacctgctggtaccgtcgagtgagcaggtgcagacgctgtgacactcagggacaggctcacagccagtcacacacctgcacggcctggcaccgccaagtgagcaggtacagacacagtgacgggctggcaccgccgagtaagcaggtgcagatgcagtgacaggctcacaggcagtcacacacctgcacctgctggtaccgtcgagtgaccaggtgcagacgctgtgttactcagggacgggctcacaggcagtcacacacctatacgggctgacaccgctaagtgaacaggtgcagacacaatggcactcggggacgggctcacacgcggtcacacacctgcaggaacacgcgcacactacacaccgttgctctcgcctcccggtatcaccttcgaacgcgctggccggccccctcctagcctggtgcagtcggctccgcttctactcagtctcgggtcctcctgggccaacgcagaccctggtgcctccttccttagacgagctaaggtcaagacttctgctgctgcggaggagcccgcgcaccaggccggggtggactgcgcctgcgcatcgggcccgcctggttcttaggaactacgactcccagggggcgctgcgcgctcgccggcaccgcgactaaagcttgcaaagcctgggtcatcgaaactacaactcccagaaggctaagcgtctgcacacgctaggtccgcagggcgctgacccctgggggcccgaggagcgccgggctgctgccccgagccccgcccactacagcctcagtgcatggcggtgggcgcttccagtaactcaggggtgggacttttttcttgctcaggggatgaggccgagcccacaggcttagaaagaaggaacttgagtccgggcacctgtcatcccagcgcttagggaggccgaggcgggtggatcacctgaggtcaggagttcgagaccagcctggccaatatggcgaaacccccgtctctactaaaaatacaaaaattagccgagcatggtggcatgcacttccagctacttggaaggctgaggcgggagaatggcttgaacctgggaggcgagggttgcagtgagctgagatcgcaccactgcactccagcctgggtgacagagcgagacttcgtctcaaaaaaaaagaagaagaaagaaggaagctgaggttcagacaggctaagtccctactgcaggctgcggaatctaaaaaggtaggtgccagggtttgcaacccacacttttattttggtctcaggtagctgatgtcattccagtctatggcaaagaaggtggcaaatccattaacatagatgaagaatttcattttactttttagttttatttatttatttatttttattatgtatcatgcttttaatacaaactttaaaaaatctggaacaatagaaactgtacagatttgatcaatctttttgttttgtttttaaactaaaatctctaaacacaccaatgtcctattccaaaatattgcacaacattctgaatacaaaacccttgattgtattcctccttcactgaagaaaaaacttcatgaccctgctccccgggctcctctccaggcttgcgtcaatgcccccttcccatccctagggagaaaactagagaatctataactcactgcattgagaaaaagacatcattctggactaacagtttccattcttcagaagataatccaccttttgatttgttcctgggaaacagggatagatagaggatggggaaaggggagaaaaggttttatttctcctcttttttttttaaagtttgtttttcctgaaaaaatatgtttctctcatctttttaagaaaaaatcttgaaaagaaaaaaattgtttttacgttagaaatatacatatattatatatacctcttacattttacaaatgtagcaaattattcaatacaaacggacaccaaaaaatgtaaaaaataaaaaaaagttttcctaagaaccaggtaaattagtgcagatttctgtttttgttttcttaaaaaaaataaaattgaagcaaaagtgcctagatttgagacaagacagactgaactgggcccaagagcccagcactggagtcatgctcctgaacacacatttttcttcgtatttcaaaagacacaaaggggttggtctccccccctctccctacatgtgagaaacaagcagacctggtgtgggtgggtgcctgtgtgtgtggatgggaggagggatagaaggggatgtaaggcagcatccaacctttcccagagagaagctatctgctgggcctgtcacctgtgtgggagccgaggatgagggaaagggtggcccagactgggctggcccctgagaagtctaggggaacagatggtgctgggctgagaagccaggacattgcctgccgggggaggtagagctggtgcctactgcagggagaggaggctggcagtgccggcctgggctggacccactgccatagcagttgcctacttggggtccctgggtaggatggagtgggtggggtgccaggggctttggtgctttctggtgatgggaccctgatgccaagtgcccactttgcaaagatgaaaaagttcatgaccctgctcccttggctcctgtccatgcttgcctggcctcctggggttggaggaacaagctctctcctggcagaggcaggagagagttttattttttagaaacagtttcgctttgttgcacaggctggagtgcagtggtacaatcacggctcactgcatcctcgacctccccaactctagtgatcctcccatcttagcctcctgagtagctgagattgcaggcatgtgccaccacactggctaacttttttttaacttttattttttgtagagatgaggtgtcgctatgttgccctggctagtcttgaactccaatccttccacctcggccttaaataattttaatagttgacatgcacatggcatttactattggccggcattattttaaggtgcctgctctgaaggaattctgttagccttcctaaattattcccttggccattggaaacataggcatgagatcatttttagataattggaaaagcagagaaatctgtgaagatagaatgggaaaaaaaatgcatttcactaaaccaacatgccattgattgtgagattccacattactttatgtagccccacggctgcccttaaaccatgacacatgctttatttacagttcatattttacttattcgtagacctcaagaggcattctgtgcttccctcttccttctggaagcttcatgagaagggacattttcctcaaaggatggacaacagaaacaactcaaatattcatttcctttaaatatggtttttaagacaattttctttagaaagccacatttacctgttgggggttgatttatgctcacccccctcccaaatatatgttggaatgctaaccccctattcctcagaatgtgactttatttggagacaggttctttacagaggtaataaagttaaaatgagtaaatagggtgggccataacccaaaatgacagctgtccttataaaaagggtgcatttgcacgcagagacacgcatagagagaacatgatatgtagaggcacagggagaaggccgccatctgcaaaccagggagagaggcctggagcaaattcttcttcatggctcttagaaggaaccatccctgcctacaccctgatttcagatttccagcctccagaagcgtgaggcgataaatgtctgttgctgcagccacaggttggcggtgctttgctgcagtagccttagcacctgatagatggtctctttacatgtcaagcacattgcagcgcacatttgacacacagggagatggaagctcctggaggataagtgttttgtctgtgattttgaaggttgcaagtggaggaactgggattcgaacccctctctgtgtgatgcctatgcctcctctgtgttaacatttatttttacttatttttattttttagtttttgtagagatgagggtctcactatattgcccaggctggtcttgaactcctgggcccaaacgatcctcctgccttggcctcctggtcttgggattacaagcataagccactgtgccaggcctacactttaaagcactttgcctctttaaagcactttgcctctttcatttcctagcctggagaaaatgtacttctgtggtcactaagaaaacaccttcacaatcaggcaaaaatgtccccagaaaatgctggcttgggctgctgaggaaatgcacaatcaaatcaggccacacaacgtttcagagaccctgaggcagggactccatgtcccagctatgtttgtcacacaccagtaggcagcctctacccaggggtggaagattctagacccagctataggctctggcaaccagggcaggcagctccttccaggaaccggtttctgtggttttctttggtcacttccattaagtcttaaacaccccctggaagaaaatgaaagtgtgacgttgaggaacgtgagatcagatggtggagtagttttctagagccaccataacaaagcatcacagaccagggtcttaaacaatggaaacttatttcttcacagttctcaagaatggaagttcacgatcaagttatggccaaggttggtttcccctgatgcctctctccttggctggcagacgaccatcttccccatgtcttcatatggtcttccctctgtgtgtgtctgtgtcctaatctctcccacactcttttttttttttttttttttttttttaagaatgtcagccatgggccgggtgtggtggcccacacttgtaatcccagcatcttaggaggctgaggcgggtggatcacctgaggtcaggagttccagaccagcctggtcaacatggcgaaacaccatctctactaaaaaaaatagaaaaattagccaggcgtggtggcaaatgcctgtagttccagctactcaggaggctgaggcagcagaatagcttgaacccgggaggtggaggttgcagtgagtggagatcacgccactgcactccagcctgggcgagagactgagactccatctcaaacaaaaaacaaacaaacaaacaaaacaaaaaacaatgtcagtcatattggacttgggacccatgctaatgacctcattttatcttaattccctttctccatctccaagtacagtcacattccaaggaatggggggttaggacgtcaacataaaatttggtggtggggcacaatttggctcatcacaatgggtaaaatggggcattaagctcacatcctgaatctaaaacccacaagaggctggagtactttgctttccctggttcatgatcaccgtgctaactggagtgtggtcaccttgaaattggcttagaggaagatttatgatatcctcccaagtcaagggctcaggctctaaacaccggcttaaataagagctgagtgaaagtccacaaatcttgttacatcaacttctgctggactttgttggacagatgctgaagtcctctgtggagaaacaccttagcaacttgtcaaagtagttcatttctagagatctcatgaccaatgagcaattattccagattccctgtgggttgaaatattctgaattttatgctgcattatcattataactgggtgatctctggcttagcatcacgtttgtgacctcctggcttctaaatgtttagtgcccacctggcctctaccaccaaaagatcctattattcccaccaagctcatggaatccaatttcctcgtggcattttctccatcctacaatggacagcagccacagggctcttcaccgatccagaagcctcttcaccttacagtgttggtgaggcaagtctcccatgggtcctctgggagtatgtttaagggtacctgggcagtttgcctgcatagaccgatgtctacattcacgtttccttaagcttccagactcccccctttaccgtgtactaggaaatggctgggattttgacctcaggggggttgccagtccattccagctgctatcacaagacagcataaacagggcagcttataacgagcagaacaggtgatgtatttatttatttaaacagagatgaggtctccctgtgttgcccattctggtcgcaaactcctgggctcaagtggtcctctttcctcggcatcccaaagcgctgggattacaggcatgagccactgtgcctggccttgaaaagaatcattctgaaggctagaaagcctaagatgaaagtgccaggagattcggtgtctggtgaggacccaattccttgttcgtagatggcaccttcttgctggctgtgtcctcacagggtggaagggagaaaagagctttcttgggcctcttagaattatgctaatcccattcatgagggctcagccttcgtaaccaaatcacctcctcaaaacctcacctcccaacaccatcaccttggtgattaactttcaacataaaagtttttggggggtgacacacacattcaggcctacagaggtggagtgatctgcagatgactgttgattcaggcgtcaccgctccaacactggagactctttttttttttttttttttttgagacagattctcgctgtctggagtacagtggcacgatctcagctcactgcaacctccacctcaagcagttctcctgcctcagcctcctgcgtagctgggactacaggtgtgtgctaccgcgcccggctaatttttgtatttttagtagagacagggtttcgccctgttggccaggctggtctcaaactcttgacctcaggtgatccaccctgctcagcctcccaaagtgctgggattacaggcctgagccactgcgtccggccctggtcccttgatctaggatttcagcctccagaactgggagagaataagtttctgttgtttaggtgaccgagtctgtggcactttgttatggcagcccaagctctctgatatagaggctaagcaactgccatgcttcatttacttaatcagctgtgggtcggcactgtgggttgggtttagtcaactagttcttctgtcttggctgggcccactcgttcatctgtgctgagctgggttgagcggcggctggcccatctgtagcctctcatcctctgccaggacagcctagggtcatttccatggcagcctggcagggttccgagagagttagtaggaaccgtcaagcccgttgagcacaaggctctgtactgacagctttgcacttccactgcaagctactggccaaagcaaaccacaggtgcagcccagatttgagggatgggaaaatggccacaggacaaacggcatgggttcaaggaggggtggaatactaggatgagttttgcaatctgtcatgtgcacatacacacatgtggtgagttggatacagcctggtgtgtgtaattacaaacacccctctaataaaaatgtgcaaagatctttcaattactcaagtgatgttatttccaaacctttcctatcagactcaaccccctttagatacgattattctcatgctggctgggcgtggtggctcacacgtgtaatcccagcactttgggaggctgaggtgggcagatcgcctgaggtcaggagtttgagaccagcctgatcaacatggagaaaccctgtctctactaaaaatacaaaattagctgggcatggtggctcatgcctgtaatcccagctactcaggaggctgaggcaggagaattgcttgaacccgggaggcggaggttgcagtgagccaagatggtgccactgcgctccagcctgggcaacaagagcgaaactccgtctcaaaacaacaacaaaaattatcctcatgctaaaatgtattcccaactatgacttgaatttctctatttattggtaaaagaaaaattcggccaagcgcggtggctcacacctgtaatcccagcaccctgggaggtcgaggcgagaggatcatgaggtcaggagatcgagaccatcctggctaacgtggtgaaaccctgtctctactaaaaatacaaaaaattagctgggcgtggtggcagccgcctgtagtcccagctgctggggaggctgaggcaggagaatggcgtgaacctgggaggcggagcttgcagtgagccgagattgcgccactgcactccagcctgggtgacagagcaagactccgtctcaaaaaaaaaaaaaaaaaagaaaggaaaagaaaagaaaaaaaaggaaaaattcagaggtggcatgtgcaaaacttgcaccatacatttatatagctgatactcaattgaagaacatgtatgtgattttcagattcttgctgtgataaatgatgtttctgtgaacatggtttttaccagtttttaaaaatgggtgatataataaatagaatgtgaagctgtatcagtcagggttcagaaacagaatcaataggagatactatgtacctatccacatatatattatagatgtatatattaatagacacaaattgatcacgtgagccaattccttaaaatctttctcttatctctctctgtgttgtctatatgtatacatatataatagagattctggtggaaggctctgagatcaagggggaagggaggcaggccatgaaaaagtcactccaagacagattggggtcctcagctctgcagacccaggaaattcagatatatgtgtgtatatatacctgtccctatctatctatctatctatctatctatctatctatctatctatctatctatctatctatctatctatccatctgtctatctatctgcctgcctgcctgcctgcctgcctgtctgtctgtctgtctgtctatcatctaatgtatgcagaggttgagatttattttaaggaattgtctcacacagttgtgggagttggtttgtagggccagccagcaggtgggaaactcaagcagacattgatgctgaaatcttgaggcaggatttcctcttctctgggaaaccctgagttttactcagaaggccttcaactgattggatgaagtccacttacattaccgagggcaaccttttcttaaaaaaaactggttgtagatgataaccacatctacaaaataaccttcacagccatgcctggattagcatgtgattggattaccaggcactggaccccaaccaggttggcccataaaactcaccgttagcaggagtgttgtggggagtgggcaggaaggggtatgtagaaagaaatgactgaggaagactgatgagataaatattggttctaagtacaattaggaaagatcaccaagtcctactttaccaaaaaaaaaaaaaaaaagaaagaagaaagtaggccaaatgtaaaccatgatacatgttattttgttatttattcatttttttttgagacggagtctcgctctgtcgcccaggctggagtgcagtggcgcgatctcggctcactgcaacctccacctcccgggttcacgccattctcctgcctcagcctcccaagtagctgggactacaggcgcccaccaccatgcccggctaattttgtctttgtatttttagtagagacggggtttcaccgtgttagtcaggatggtctcgatctcctgacctcgtgatctgcccgccttggcctcccaaagtgttgggattacaggcgtgcaccaccgcacccagcccactgctttccatttttaaggtctttatctagaattagaattgctggatcacatgacaattttatttttaattttttttggaaaccttcagaccattttccagaatgactgcatcataccacattcccatcagcagtgcagaagggttccaatttctccaaatcctgccaatatttcttacattgtgttttatggatagtagccatgttaatgaaagtgaggtggtttcttattgcaaagatgatgatcttttaaattttttcagtcgtaattgcttaataatagaatgtgtggctggacacggtggctcatgtctgtaatcccagcactttgggaggcccaggcgggcatatcatgaggtcaggagatcgagaccatcctggctagtacggtgaaaccccgtctctactaaaaatacaaaacaaagaaaaaaaaattagccaggcgtggtggcaggcgcctgtagtcccagctacttgggaggctgaggcaggagaatggtgtaacccgggaggttgagcttgcagtgagccgagatcgtgccactgtacttccagcctggaggacagagcgagactctgtctcaaaataaataaataaataaataaataaataaataataataataatagaatgtgtgtgcctgctgggcattctataccttctcaaacattggcatcagactggactatgccacccgcacttcctcatccttgttgattttcgtgggtttgattcacagcaaacactgccaacccagcatcacaaagcatgatgttatcaaaggaagtgtagagagatcttaggctgaaactgtggaaccctggaggtggaggttcatgtgtgtcagatgtctaatactgctacgcgtccctaaaattgaaagaatcagggtacctgggctgacagttgcagctgtggggatagagaggcagaaaagcaggaggtgttcattggagggggagagaacggaagagctcccctggtcgcctagcaacgcggagacgccccacaggggactctggtgagaacaggcagtggcagaggggctattctgcctcagccaaatgtagctgcagagactcaggaaagtaatgtagatgtagaaattagaaattaattaatttctttaattaataaccctcagttgtatattgagacggtctccactgattttttcatgtctaccgtttgcatagttttaggccagtaggtcccaaaatgtagtttaaggactcctgggggaatcaagaccctttctgggggtccataattcccaacattttcctaagaaaattaagaatttacttgcctaccgacttttcaatttatctgcatgatgtaatactgcaaatgtttaagtggcagatttgagaatctagctgtcttgtactaaggcgaacattaaagaaatttgcaaaaaaggccgggtgcagtggctcacgcctgtagtcccagcactttgggaggccgaggtgggcggatcacaaggtcaggagtttgagaccagcttggccaatatggtgaaaccccgtctctactaaaaatacaaaaattagctgggtgtggtggcgggcactcgtagtcccagctactcaggaggctgaggcaggagaatcgcttgaacccggcaggctgaggttgcagtgagctgagatcgcgccactgcactccagcctggcgacagagcgagacgccgtctcaaaaaaacaaaacacaacaaacaaaaaaacccaaaccctcagttgtatattcccaaacccatcctcagtggagacggtctccactgattttttcatgtctactgtttgcatatttttaggccagtagttcccaaaatgtagtttaaggactcctgagggaatcaagacctttttgggggtccataattcccagcattttcctaagaaaattaagaatttacttgcctaccgacttttcaatttacctgcatgatgtaatactgcaaatgtttgaattaagtggcagattggagaacctagctgtcttgtagtaaggtgaacattaaagaaatttgcaaacatgtaagacaatgctaattttcttactaattctttggaaaatactgtataattgcctataaaaattgtgaaatgttaatatataataagattattatttttaagttttaagtgtataattttctcagcttcaatatgtaattgtatgtaaatatagatcatacaaagaaaaaattttaggggttctcaatatatttaaaaaatataaaattggcctgagatgaaaaactttaagaattactttcttaggttaagtttttagatatcagctggctgggtggaaggaatgtgcatactcggtgcttttcatacacggtgtcaaattcccatgaagctatccagttgttccgtggctctaaattctcatgggaaatgtaacccagatctgtctcgctgttatcaatttttcacgctgcctaccataattaacccagtgaagaatttcagtgaaaggtagattgagctatttgtacccagccttccagagaattccctttatataggataagtttaaattctttttggggggccggcgggggtgggggtggtggtgtctggaaaggaggatcataggataagtttaacattcttagatgagaaagtcaaatgtagattcctgagttcacaaaccccagccccaacattcatgatgtgggtgatcctggggaagacatctgtccttctgagcccacctccttcacttagaaatgggcactgggggtggggaaggattggacctggtgccccccaagacattgtaagaatcaagaaatagtagctaggtgggggtttttgggcatttctaccataaatatgaaatataattttattttaataatgtgacaaataagataaagagtcatcttcttatttattattattattattttttgagatggagtcttgctcttgttgcccaggctggagtacagtggctcgatctcggctcactgcaacctctgcctcccaagttcaagcaattctcctgcctcagcttccccagtagctgggattacaggcgcccaccaccaaacctggctatttttttgtatttttagtaaagacggggtttcgccatgttggccaggctggtcttgaactcctgacctcaggtgatctacacgcctcggcctcccaaagtgctgggattacaggtgtgagccaccttgcctggccgagaatcatcttctttgtgaatttttccccaaccactgtatcgataatcgttaaaacaaattcctcctcaatgctgtcataagaggtatgctggttctcttgttccccatccctcatggggatataactgactgtttacctgtttcccccaccaggtcatgaactctgagagtttgagatgagcctctaaaagctgtatcaatagcaccttgcactgttgaagcaggtaagtgttttccttgttacttcttaagttcagttggaaacccaacatagcaaatcctctagaatgcagctgaagcagtactaaggctgggtgtggtggctcatgcctataatcctgtagggaggcaaaagcgggaggattgctggagcccaggagttcaagaccagcctgggcaacacggcaagacctggttctccacaaaaaggaaaaaaaaatgctaagaggcaagtatatagcaataaactcctacatcaaaaaagtagaaacatttcaaataagagattgggggcagtggctcatgcctgtaatcctagcacttttggaggccgaggtgggtagattgcttgagaccaggagttcgagaccagcatgggcaacatagcgagaccctgtctctacaaaaaatcagaaaattagccaggcgtggtggtgcaagcctgtagccccagctactcgggaggctagggtgggaggattgattgagcctttgaggtagaggttgcagtgagctgagattgtgccattgcattccagcctgggtgacagagctagaccctgtctcaaaaaaagaaagagagaaagaaagagaaataaataaagagagaaagaaagaaaagaaagaaaacaaacaaggaaggaagaaagaaaaagaaagagaaagaaagaaagaaaaagaaaaagaaagaaagaaagacttcaataacctaaggatgcacctcaagaatctaggaaagcgagaacaaaccaaacccaaaaattagtagaagaaagtaaataaagcgcagagcagaaacaaataagattgagaccaaaaaaatacataaaagatcaatgaaaaaaaaattgcttttacatcatggtcttgaccttgcagggatggcccctcccagttttagccaatttctcgagtgataaataacttgcttgagagcatgccttttatatataaaccaccaatccagagcccacatcccacccactctctaacagggcgctatactcaccccagggccaggtatcacaccactaagaacagcccttttccccagatcccactgaggttatccaaagtgaccagccctaacctatgaaatctgcctcacttcttcctttccacagaaactatagcaaagtcttgtccacacccacatttcactcacctccttctgactcctggcagatcctggcgctttccccatggggctgcctgagctgagacgggctctcttctcctggaaactgagtaacacaatttatttcaatgacagtcacttcctcatctgttggcctcagcgtacctccaattttccattacacaataaatggaaaataatataggccgggtgtggtggctcacgcctgtaatcccagcactttgggaggccgaggtgggtggatcacctgaggtcaggagtttgagaccagcctgaccagcatggcgaaaccccatctctactaaaaatagaaaaattagctgagcttcgtggctggagcctgtagtcccagatacttgggaggctgagccaggagaattgcttgaactcagaaggcagaggttgcagtgagccgagatcatgccgctgcactctagcctgggagacagagcgagactccatctcagaaaaaaaaaaaaaaaagaaaattgaattgggccagcccctccacacctgtgggtatttctcatcaggtgggacgagagactgagaaaagaaatgacacagagacgaagtatagagaaagaacagtgggcccaggggaccagcgctcagcatacagaggacccgcactggcgccagcccctgagttccctcagtatttattgatcattatttttactatcttaacaaggggagcgtagaaggacaacaggtggggagaaggtcagcagggaaacgtgcgcaaaggaatctgtatcatgaataagttcaaggaaaggtaccgtggctggatgtgcacgtagactagatttatgtttctctttacccaaacatctcagtgtagcaaagagtcacagagcagtattgctgccagcatatctcacctccagccacagggcggttttctcctatctcagaatagaacgaatgggaatgatcggctttacacccagatattccattcccagggacgagcaggagacagaagccttcctcttatctcaactgcaaagaggcctccctctttcactcctcctcctcagcacagaccctttaagggtgtcccgctgggggatataaggtctttcctttcccatgaggccatatctcaggctatctcagtgaggggaaaccttggacaatacccaggctttcttgggcagaggtccgtgtggctttccgcagtgcattgtgtccctggttaatcgagactggagaatggcgatgacttttaccaagcatactgcctgcaaacatattgttaacaaggcacatgctgtacagccctaaatccattaaaccttgattcaatacagcacatgtttctgtgagcacagggttggggctaaagttacaggttaacagcatctcaaagtagaaaccattttttttggtacagatcaaaatggagtttcttatgtcttccttttctacatagacacagtaacaatctgatctctctttcttttccctacagaaaataatatggagatgacagtgtcttgtacaactgtgtgatggcttgtctccccatgtctgtgtgattgtgtgtccttgagtgtgttggatggagtgtccttctgtgtgtgtgtgtctgtgtttctctctgactctgtgcggttgagggcgtgtggtctctcacgtatgattggatgtgactgcggatctccatgtgtgattatgagtcacgcttcaccggaaagtttctatctcagcctggatgagccacaggaatgtgtgtgttcaggtttgctgtgtgtctgtgtctgtttgacctgggctgttgtgtgtgcatcttagtctgctgtgttacatcatgtgccgttgtgtgtgactctctctaggacagcccgagtgtgactgtgatcatagaggggatgaagccccctgtgtgtgggtttgtgactgtgagtgtgtgctccagttaggagggttttgagcgctcatgtgagtgtgtgggaagattgtggattaatttgctatggctgctgtaacaaaacaccacagactgggtggcctgggtagactgggtggcttaacctaatactaatagaagcttattttctccctgtcctggagcctggagcccaagatcaaggtgtcgaaggagcctgtgttcaggaggcctctctccttggcttcttggcggccgtattctcttggcgtccacactaggtctttttttttgtatgcatccctggtgtcactgtgtgtgtctaactccctcctctataaggatgccagtcaaatgggagtagggccagtccaaaagcctcatttaatcccctcttaaaggccttgaccccagatagtcacatcctgaggttctggagtttagggaatcaccaaataagttttcaggagaaagcagtgagcccataacagtgtgtttgtgtgtggatgtgtggtcatgggagatgctgtgaaggttgccattgtgtccacatgactgtgcgtgaaacagtgattcatgcaattatgaaacccatgttgtgtgagttccacaagaccaaggcaccttttatccactaaatgtgcacatgtctgtgtgtgtgtgtgagtcccacaaaactcaggcatctttcatccactacctgtgcatgtgtgtgtgtgtgtgtgtgtgtgtgtcccacaagacccagacacctttcatccactacatgtgcatgtgtgtgtgtgtgagtcccacaagacccaggcacctttcatccactaaatgtgcatgtgtgtgtgtgtgtatgtgtgagtcccacaaaactcaggcacctttcatccactaaatgtgcgtgtgtgtgtgtgtgtgtgagtcccacaaaacccagacacctttcatccactaaatgtgtatgtgtgtgtgtttgtgtgtgtgtgtatgagttccacaagacccaggcacctttcatccactaaatgtgcatgtgtgtgtgtgtatgagttccacaagacccaggcacctttcatccactaaatgtgcatgtgtgtgtgtgtgtatgagttccacaagacccagacacctttcattgtgtgtgtgtgtgtgtgtgtgtgtgtgtgtgtgtgtgtgattgaaggagatactatttgtggataaataaattgaaacctcaggccactttcctgtcttatatcaaccttattagaatcctgcccaccccaaatgcgcaattccataggtagagcaagataggtcctaggatccatctgggaagtgcccaggatgcccttcctaggatgcttggagacaggattggagcaggtgatggaagcatgggctcagggccaggcagtctggagacctctcctctctgagcccagtgttgcctgtaaaatgcagacactcctaggacctcactcacagccaggggtgcgggagatggccgtgcatattgtactgtgcacttcggctcctgttcaaaaggatacgtgggatgtgaaacccagcctgcgctctctccacagctgtgtccatgccagggccagaattcccactggagtatgacattggtccatccaaagtcccagagcctaccatggccatgtgcaccgttgtcacttggggaaaaaatcttcttaaacagataaacaaacatgtgcaaatgcatatattttagagtatcatcttgtttttaagcctgggcaacatggtgagaccccttctctacaaaaaacaattagctcggcgtggtggtacaagcctgtattcccaactactcggggactgaggtgggaggatcgcttgagcctgggaggtcgaggctgcagtgagctgaggtcgtgccactgaacagagtgagaccctgtgtaaaaagaagaaacaggacaaaacaaaaaccaaaaaccaaatcttaacttttgtccgctaatttgaaggaacgcgtatgaaatcacgttgctgtcactagatggcacttttgcaccatgaaaaaaataggctctaattattatttttttttttacttttcaattttcaattgtggcaaaatacatattacacagaatttaccatcttaagcattttgtgactaatatgtgaaagatatattactaatatcataagcctgtgatatatgccttttttatttttttaaactatggtatttatcattttaaatatagtcatgaatcgacaacagggatacattctgagaattttgtggttaggcaattttgacattgtgtgaacatcttagagtgaacttacaaacacctagacggtgcagcctactacacacctaggctctgtggtatagtctgctgctcctaggacacaaacctgcgtggcacgttgctgtactaaatactgtaggtacctggaacacagtggtatttgtgtatctaaacatagaaaaggtacagtacaaatttggtactatgatcttatgggaccgctataatatatgagacctatcattgactgaaatgttactatgcacctcgtgactgtatttttttttttttttttgagatggagtcttgctctgtcacccaggctggagtgcagtggtgccatatcagctcactgcaagctccgcctcctgggttctcaccattcttctgcctcagcctcccgagtagctgggactacaggcgcccaccaccacgcccggctaattttttgtattttggtagagacggggtttcaccatgttggccaggatggtctcgagctcttgactttgtgatccaccctcctcggcctcccaaagtgctgggattacaggcgtgagccaccacgcccggccatgactgtattttgagtgtgcatcactattaagtacattcacttgttctgccacaatctgcaccattcctcttcagagcacctttcttcttggaaaacaagaactctgtgcctattaagcaataactctccatttctcctccttccagcctctggaaaccaccctttttatttttcattcaggaattctgactcttctaagtaccttgtatacctggaatcatacagtattttgtccggttgtgatgggcttatttcaatgaacattgttcctcaaagttcatccaagtcatagcatgggtcagaatttcctttctttttaggcccgaataatatgccattgtctgtatagaccccatcttgcttatccattcaccaatcgatggagacttgagttgcttccactttgactattatgaataatgctgccatgcacgcggttgcacaaacgtctctttgattctctgctttcaaaacttgtgagtaagattcagaggtaaattgctggttcatgggtaattttatttctgttttttcagaacagtcggatggtttcccaccacagctgcatcacatcacgatcgcaccaacggtgcaggtgtttcagcctctccaaatcctgtcagtgttgttatattctgtttaacggatagtgaccatggaaacggcaatgagttagttccttatttctttgccagggaaaatattgctttcatttttaatacttattacttaatcatggtatatgtctttggttataccgtggcaatggctactgaagagtatcctgacacatggatgggggtcaggtcttgacctctggggtgctttattgttagggctgttgttagagttggcagcagttggatgaataatggaatatgatgaggtggaagttgtaattgattttttttttttggaaacagagtcgttatctgtcacccaggctggagtgcagtggcatgatctcagctcactgcaatctctgcctgccaggttcaagcaattctcctgcctcagcctcccgagtagctgggactacaggcgcccgccaccatgcctgggtaatttttgtacttttagtggagatgtggtttcaccatgtttgccaggctggtctcgaactcctgacttcaggttatccacctgcctcggcctcccaaagtactgggattacaggcgtgagccaccacgcctgcccaactgatttttatattatggtatattatggaaaattgtgtaatttttgagggcgaggaggtaggattattgtgtgaagattctttaggtgaggcagccttgtatagttacagatgctgattggtggtggttgctggtcgatctgtatttgtgagcatttatcttgcaattgagcgtactcaggggaacaggttagataactaaaaatagagttagaagagacaggataaggaaagagaagaagtagagtttaattaggcctttttgggcggatatgaaagtggaggctgaagtttggatttggacaatgttttttggtattgatttctctagtcagattagtctaatagaagagacactaaacattgacttgtgtctagatttgtgtgcggggttgtatggtgtactgtgattggataaaaacctagtataggccgggtgtggtggctcatgcctgtaatcccagcactttgggaggccgaggagggtggatcacctgaggtcaggagtttgagaatcagcctgactaacatggagaaaccccatttctactaaaaatacaaaaattagctgcgcgtggtggtgcatgcctataatcccagctacttggggaggctgaggcaggagaatcgcatgaacccaggaggtggaggttgccgtgagccaagattgcgccactgcactccagcctcggtgacagagcgagactctgtctcaaaaacaacaaacaaacaaacaaacaacaacaacaacaacaaaaacctaatatatttgagaacttgaatgtttgtgatgggtattcaagtttaaagtcattggttatgagattaagatctgttgctaccgagaagcccgttgggaattgcacagcttctcaaaccttggacccagattggcccacgccaccctcactcctcatccatgttgatttcagttggttattgctgttcttcacggtgaccactgacactccagcaccacaaagatgtcagcaaaggaaatgtagaaggatctaaggtggagactgtgaacccctggagcctttagttcatgtggtgtcaggagatattgaatattgccgttcttcccttaaatttcaagcatagaggtaactctgcagacacttgcagctgtgaggatggagcagaaggaatgctgtacgtgttcattggagggggagagaatggaggcgctaatctggttgccaggcaatgctcagtgtccttggagatgactcatggtggaattagaatgagaacacgcagtgggggagggactcttctgaaccagcaaaatgcagctgtagagactaataaactgtatggaagtcccacagtcttccaaatggataatctgtcatttgtatattcagataatctccatttatattttcaggtctcttatttgtatatctcccaggccactagttctcaaaatattgttcaaaacctcatggcagaatcaagatcctttcaaaaggcacacaattccaaactattttcctaggaacattaagattttatttgccttttctcttcttagctttttctgcaagatataatgttccaggtgtttgaattcagaagatgattggaggggattaaagggagttgtaaaatgttagacaaggctgggtgtggtggctcatgcctgtaatcccagcactttgggaggctgaggcagacagatcacctgaggtcaggagttcaagaccagcctggtcaacatggtgaaaccacgtctctgcaaaaatacaaagaatacaataatagacaggcatgatggtgggtgcctgtaatcccagctactcgggaggctgaggcaagagagttgcttgaacctgggagatggaggagccgagatggcgccactgcattccagcctgggcgatggagcgagactccctctccaaaaaaaaaaaagaatcccacagccccaccattgacgatgacctgtccatggtgttgaaggacccattggatctatgaactcttacacaggtaagggaggtagttgatgcctactgacttatgcaatggcgacttcaaagtatatttctaaaataaattgaaaccaagattccttgtttgataaccaagaaaagaagaccccaattgggtcgtgttctgcccacatcttcacataaagactgattatgcatttatctcatcactcagcattagggtagtaagtgccatgtgttagcctcctcctgttgggatctgagggccacaaattatcttttcagtgacagctgttttctgattgattgacatcaccttacttcatattttctatgaaggatccatcttttacgtcaatgtggaggtgaaagtttcctgagcgacggtttgatagcccatctccctatgtctctgtgattgtgtgtccttgactgtgttaactgtgtgtccctctgtgagtgtgcgttaccttgtttgtggttgtatttctctatgattctgtgtggttgagaatgtcttgtcttgaatggatgattggatataactatgtgtatgtgtgtgtgtgtgtgtgtgtgtgtgtgtctgtatttgtatttgagttcaaataagcctgcagcacattgtgtgtttgtgtctttctgtgtgaatgtgtctatgtttgatcaggaaatgctggtgattcttcatcttgggtggttgtgttttatcgtctgtcattgtgtgtgactctaagaactgtccacatgtgattgtacttgcatgagggatgaagctccctgtgtgtgagttagtcacggagtttgtgcactggttaggaaagtttgcatcttgagcgtgtgtgaaagtgtatatactaatttgttagggctgccaaaacaaaacgccacatcccgggcagcttgaacaacagacatgtatctacttacctttctggaggctgaattttgagattaagatgtcagcagggctggtttctcttgaggctgcctctgtagattgtgaccaatgctttcttgccatctctaacagtctttcctgtgtgtgtccatctctgatgtctctttgtgtccatattgctgcttctataagaagaaattggattagagcccaccctaaggacctcatttaacttaatcatctctttaaaaaccatatcaccaaatacagccacaatatgaagtactgtgtttgggaagaggaggcagtattcagatcataacagtgtgtttgcgtgtggatgtgtgcatgcttaagaagtggtttgaagaccatttattctgcatggccttgcgtgaaaacatgtgattcatactattacaatctcctgcatataagctaggctagcttagtgtgtgtgtgtgtgtgtgtgtgtgtgtgtgtgtgtctgtgactttattggagttttggagaatacttcagggacatacaaattgggttctatttccactctccctgccttatacctacttcactaggaccctgcacacttcaaaagccccatccagaggttgaggaacagtttcagatctggactctcttctctgggaagtgcccagaatacctctccttagatgctcagagacaagatgggagcaagtgatggaggcatgggtccagggccagacagcctagagacctcccctctctgagcccagcgtcctccactgtaaaatgcagacgctcctaggaccttactcacagccagggctactggggatgatgggatgcctgtgcatattgtagactgcactgaggctctgatccaaggagatgacctggatgtgaactccagcctgtattctctccataaactgtgtccaagccggggcttcaggcttcctaccatagcgtagcattgatctctccaaagccaggaagcctaccatgcccatgtgtgcagttattgtcattttggggaaaaaccttattaaacagaaaagcagacttataaaaacatacccttagccgggcatggtggtatatgcctgtaatcccagctattctggaggctgaggcaggagaattgcttgaacccaggaggcggaggttgtggtgagccaagattgtgccattgcactccagcctgggcaacaagagcgaaactccatctcaaacaaacaaacaaacacaaacaaaaaaatacccattttggcagggcacggtagctcacgcctgtaatcccagcactttgggaggccgaggtgggtggatcacctgaggctgggagttggagaccagcctggccaacatggtgaaaccccctctctactaaaaatacaaagattaacaggcgtggtggcacacgcctgtaatcccaactacttgggagactgaggcaggagaatcgcttgaacccaggaggtggaggttgcagtgagctgagatcgtgaaactgcactccagcctgggtgacagagtgagactctgtctcaaaacaaaaaacagaaaacaaaaaacaaaacaaaaaaatactgtcttaataatatctttttgtttcctcctttcttcccatttgaaggaatgtctgggaaattttcaaatgcctttgcttacgctagatggcaatctggcatcatggtaaaattggcttttatttaacttttttatttttacttttcaatttttaattgtagcaaaatatatattacacaaataagccatcttaagcattttgttactaatatgttaataatatgttacccatagaataagcttattattttaatttttttttatattcttaaaccgtggtaaaatagtacaattgaatattcacctttttacctagagtcaggactcacctaagggcagagatgtgttctgaggattgtgtttttaggtgatattgtcattgtgtgaacatcctagagtgtacttacacaaaccttggtggtagagcctgctgctcctaagctacaagcctgttcaagatgctaccgtgctgaattccatgggggactttaacacaatggtaagcatttgtgtaactgaacatgtctaaacacagaaaagatacagtaaaaatttgctgctaaaatcttatgagaccactgttctgtatataatataatgtcattgaccgaaatgttggtatgtggctcataactgtatgtgtgtgtgtgtatatatatatatatatatatatatatatatatatatatatatatatatatactttttggagacagagtctcgctctatcccccaggctggagtgcagtggtgcgatcttggctcactgcagcctctgcctcctgggttcaagtgattctcatgcctcagcctcccgagtagctgggattacaggcgcgccaccacgcctggctaatttttgtatttttcgtagagatggggtttcgccatgttggccaggctggtctcgaactcctgacctcaggtgatccacctgccttggccacccaaagtgctggcattacagtagtgaggcaccgcactcagcatatatatatatgtgtatatatatgtgtatatatgtgtatatatgtgtgtatatatgtatatatgtgtatatatgtatatatgtgtatatatgtatatatgtatatatgtgtatacatatatgtatatatgtatacatatatgtatatacgtatacatatatgtatatatgtatatacgtatatatgtgtatatatgtatatacgtatatatgtgtatatatgtatatacgtatatatgtgtatatatgtatatacgtatatatgtgtatatatgtatatacgtatatatgtgtatatatgtatatacgtatatatgtgtatatatgtatatacatatatatgtgtgtatatatatatagtttgtttttatttgtttgtttttgagacagagtcttgctcttgtcacccaggctggagtgcagtggtgtgatcttggctcactgcaacctccgcctcccgggttcaagcgattctcctgcctcagcctcccgagtagctggaactacagcataactatatttttaagtgtaaagttcagcaattaagtacatttacttgttgtatcctaatctgtcccatacatcttcagaactcctttagtctgggaaaaccacgactctgtacccattaaggaataactctccacttcccttttccagcccctggcagtcaccattttattttctatttctatgaatttgactcttctaagtacctcgtatacctagaatcatatattatttgtccttttggtgtggatttatttcaattgacagcattcttcaggcttcatccagattgtagcacctgtcaggatttcctttacttttgttcaatttttattttggaatcatgggatacatgtgcaggtttgttgcaaaggcacgctgcctgatgctgaggtttagcatgtgactgaagccatcactcaggtagtaggcatggtgcctgataggtagtttttcaacctgtgtccttcttcctctctcccttggctgtccacagtacctgttgtttccatctttatgtccacgtacgcccaatatttagctcctgcttataagtgagaacatgtggtatttagttttctgttttgaggtaatttgcttaagaaaatggtctccagctgcatccatgttgctgcaaaagacatggtttcattccttttttttttttttgaggtggagtttcgctcttgttgcccaggctgcagtgcaatggcatgatcttggctcactgcaacctccacctcccgggttcaagtgattctcctgcctcagcctcccaagtagctgcgattacaggcgcatgccaccatgccaggctaattttgtatttttagtaagagatggggcttcttcatgttgatcaggctggtcttgaacccctgaccccatgtgatctgcccaccttggcctcccaaagtgctgggattacaggcatgagccaccgtgcctggctggttttattccttttatggctgcatagtattccacagtgtatgtgtgcaacactttctttatccaatccactgttgatgggtacataggttcattccatgtctttgttgttgtgaatagaatggtaatgagcatacaggttcatgtgactgtttagcagaatgattcattttcctttgggcatatacccagcaataggattgctgggttgaatagcagctcaacgcttagttctttgagaaatctccaaactgctctccacagtggctggactaatttacactaatttgcatttccaccagagtatgtaagcgtccccctttctctacagccttgctgatatgttattttttttgactttttaaccaaaacttggttaacgagcaacttgggttgcttccacttttttttttttttttttttttttttttgagatggagtctcgctctgtcgcccaggctggagtgctgtggtgccatctcggctcactgcaagcctgcctcccaggttcatgccattctcctgcctcagcctcccaagtagctgggactacaggcacccgccaccatgcccggctaatttttttgtatttttagtagagacggggtttcaccgtgttagccaggatggtctcgaactcctgacctcatgatccgcccgccttggcctcccaaagtgctgggatgcttccacttttgactctcatgactaatgctgctatgcccatgggtgtacaaatatctctttaattttctgcttccattacttctgggtaatatccagaggtagaaagataattttatttttattcttttcagaactgttgtaattttttttttcacagaatctgcatctcatcacaattgcaccgagagtgcagatgtgccaacttctccaagccctgtgggtggttgttatcttctgtcttatggatagtggccatgaacatgggaatgaagtggttcattatctctttgccaaagaaaaaaatatttctttcacttttcaatagtaattacttaataatgggatgtatttgttggttcctgcacaacttctcaaatgtaggaatcagactagactgtgtcaccctgatgtcctcatcctcattgattttcatgtggttattgtttttttcatagataccactgataacccagcatcacaaagatatgatgactgcaaaaaataaaaataaaaaaatgagagaaccaatgtagaaaacatgaatccctgcagcttatacttaatgacttaatgtggtgacagaagatatgaaatatcaccatacttcccttaaaactaaactgtagggttacctctttagacagatgtggctataaggttataatagcgggaatgcaatgcatgttcatcagatcagggagagaatggagaaggtgacctggttgccgagcaaccctcagtatccttggagatgagtcaccatggaaacagcaataactcttcatttccttttttccagccccgacaaccaccattttattttccattgctatgaatttgactcttctaagtacctcatgtaccaataatcaggtacctaagtacctcatattcctggacagttgtgggggacggcggggaagaagttcctcctcagccaagggagctgtggagactaaggaaagtgattggatgttccacagtttctttcatggacaacctcttgtttactcaaatgatctccacttataatctcctgtatatcatttgtatatctcttagatcactttttcccaaaaatgtagttccaggactccggggggattcaagatttggaatgcacaattccaaataattgtcctaaacacatgaaaagtttatttgcattttccctcattttctctggatgacataatattgcacatgtttgatttaagtggacaatttgatcatagccatctagtggtaaggaaaacattaaagatatttgcagaaatgaaaagcaacaccacctttattgcgaagtttgtttggaaaatgcaagcgtacatttttctgttgtgctttgtttcactgcgcttcacagatactgagtatttttgaatggaaggtttgtgcaagtctgcattggcaagtctgagagtgccattttcctaaagtatgtgctagagagaagtcagtgcctggcttcaaagcttcaaaggacaggccgactctcttcttaggaacgaatgcagctggtaatgttcagttagatccaatgctttttttactattccaaaagtcctaggactctttatttatttatttatttattttgtgaggcagagtcttgctctgttgcccaggctggagtgcagtggcacagtcttgcctcactgcaacctccacctcccgacttcaagtgattttcctgcctcagcctcctgagtagctgggattacaggttgcaccaccatgcccggataagttttgtatttttagtagagacagggttttgccttgttggccgggctggtctcaaactcctgaccgcaagtgattttgctggttttggcctcccaaagtgctgggatcacaggcgtgagccaccatgcgtgggctaaaaattctaggactcttcaggattgtgcaaaacctactctacctgtgctctataaatggaacaaagtcaaaatatcaacatcaataggagtttgaaagaagttgattccaactcctatttgatgactttgtggggttcaagagttcaacggaggaagtcactgcagatgtggtagaaagagcaagaaaactggaattagaattagagcctaaagatctgactggattctgtaatctcataagaaagttttagcagatgagttgaggagttgcttttttttttttttgagagacagagtctcgctctcactctgtcgcccaggctggagtgcagtggcacaatcttgcctcactgcaacctccacctcctgggttcaagcgattctcctgcctcagccttccgagtagctgggactacaggcacgtgtcactatgcctggctatttttttttttttttgtatttttagtagaaacagggtttcactgtgttagccaggatggtctgaatctcctgaccttgtgatccacccgcctcagcctcccaaagtgctgggattacaggaattgcttcttttgaacaagcaaagtaagtggtttcttgagatggaacctactccttgagaagatgctgtgaacattgtagaaatgacaacaaataatttagaatttagattatattctccagttcacaatatccccaccttaatgtaaaatatattattgctaaaaaattataagaatcacctgacccttcaatgagtcataaccatttttctggtggagggtcttgcctcaatgttgatggctgcagactgatcacggtggtggttgttcaaggttgaggtggccgtggcaatttcttaaaatatttcttaaaatatttctctgtagcatgtgatgctgtttggtagcattttacacacagaacttcttttaaaattgaaatccatcctgtcaaaacatgctgctgctttatcaattaattttacattttattttttatcttccagtttacaaaccccagccccaacattcattatgtgggtgatcatgaagaagctacctgtccgttctgatcctcacaatacattgtaaacaatcaataaataatagcttgttttttttgcatttctagtgtaaatatggaatacaattctattgtgatgatacagcaaaaaaagtgttagaaagaagagtcactttctttgtgagtttttccccaaccacagtatccacaattgttaaagcaatttcctcctcaatattgtcataaaagatgtgctagtttttttcttccccatctctcatggtgaaataacagatagtttacctgttttcccctccaggccatgaactctgagaatttgggctgcatttttaaagctgtatcactggcagtttgtactcaaaaagcaggtaaatatttccctggttactccttgattttagaaggaaacacaatacacctaaacctataggatagagcaaaagcagtactaagagagaggcttatagcaaaaaactcatacttagagaagtagagagactttcaaataaatacattaatcatccacctagaaaacctagaaatgcaagaacaaatcaaacctaaaattagtaaagaaaagaaataaggagcagggcagaaataaataaaattgaagccaaaaacaattaccaaagatcaatcagacaaaaagttcatttttggaaaagataaacaaaactgagaaatctttagcagactatgagaaaaagaagggaaaagatccaaataaataaatccgagacaaaaaggagacattaaactgctaccaaagaaatatgaaggattattagtggctattttgaacaactattttctaataaattggaaaatcttgattcttcctatccatgagcatggaatgttcttccatttgtttgtgtcctcttttatttcgttgagcagtggtttgtagttctccttgaagaggtccttcacatcccttgtaagttggattcctaggtatttcattctctttgaagcagttgtgaatgggagttcactcatgatttggttctctgtttgtctgttgttggtgtataagaatgcttgtgatttttgcacattgattttgtatcctgagactttgctgaagttgcttatcagcttaaggagattttgggctgagacggtggggttttctagatatacagtcatgtcatctgcaaacagggacaatttgacttcctcttttcctaattgaataccctttatttctttctcttgcctgattgccctggccagaacttccaacactatgttgaataggagtggtgagagagggcatccctgtcttgtgccagttttcaaagggaatgcttccagtttttgcccattcagtatgatattggctgtgggtttgtcataaataatcttgaaaaaaatgaataaattattgggcacattaaacctaccgagattgaaacatgaagaaataaaccactttaatagaccaataacaaatgactatatagaaacagttaaaaaaaagtgttccatgaaataagagcccaggacatgatggttttactgctaaattctagcaaacatttggatgagaactaacgccaaatctactcaaactcttccaaaatattgaagggaagagaatactttcaaactcattctatgagcacagaattatcctgatactaatgtcagaaaaagatacaacaaaaaaggaaaactatgagccaatattcctgatgaacatagaagcaaaaatcctcaagaaaatggtaggaaactgaattcaacacgtaaaaagatcattcatcatgatcaagtagaattcatcccagggatgccaaagaggtttaacatatgcaaataagtgaacacattagcaaaatcacagacaaaaaccatatcattgttttaatagatgctgaaaaagcatttaatacaactcaatatcccttcatgaaaaaaactgttaaacagggtatgaaaggaatgtgcccccagacagtaaaagccatgtgtgacaaacccactgctaacatcacaataaatggagaaaaataagaaggctttcctttaagatctagtataaaggaatgaggcccaatttcaccacttttattcagcacagttctagaaatcctagccaaagcagttagacaagagaaaaaagtaaagggcatccaaactggaaagaaagaagccaaattgtccttgtttgcagataacataatcttatatttagaaaacctaaatatcccaccaaagaagactgttaaaactgacgaatgaattcaagaaagttgtatgatacaaaatcaaaatgtaatagatagtagatttttatatgccatcagtaaacaatctgaaaaggaaatcaagaaagcaatcccatttgcaatagctacaaaaaattacctagaaataaatttaaataaagaagcgaaagatctctacaatgaaaactataaaacggtgatgaaaaatattaaagaagtcacagaaaaatggaaagatatcccattgtgatgggttgaaagaattaatattgttaaaattttcatactactgcagcaatctacagattcaatgcaatccctatcaaaacaccagtgacattttccacaaaaatagaaaaaaaatcctaaaatttgtatggaaccataaaagaccctgaatactgagcaaagagaacaaagctggagacattacactaccagacttcaaaatatgctgcaaagctatagtaacaaaaacaacatggtactggcattaaaaaacaggtacataggctgggcgcggtcattcacacctgtaatcccagcactttgggaggccaaggctggtgaatcacctgaggtcaggagttcgagaccagcctggccaacatggtgaaaccccatctctactaaaaatatgaaaaaacttagctgggtgtggtggcagatgtctgtaatcccagctactcaggaggctgagggaggagaatcacttgaaccctggaggcggaggttgcagtgagctgagatcacaccgttgcactccagtctgggtgacaagagtgaaactccatctcaaaaaaaaaaaaaaaaaaatcagaaaaaacaaaataaaacaaaaaacatgtaaatatatcaattaaacagagaataaagaaataaatccatgcattttcaaccaacccattttcaataaaggcaccaagaacatacaccagaaaaaggtggtctgttacataaataatgctgggaaaactggatattcttatgcagaaagaaactagacccctatctctgaccacataaaaaattgatcaaaatagattaaagagatagatgtgaaactatgcaactgctagaagaaagcatttgggaagtgcttcaggacattggtctgggcaaatacattttgagttgacctccaaaggacaggcaactaaagcaaaaatgggactacatcaagctaaaaagcttatacacagtagaggaaaaaatagcaaaattaagagaaatctacaaaagagatacctgcactgtcatgtgtattgcagcacaattgagaaaaagccaagttatggaatcaacctatgtgtccaccaatgaatgagtgtgaaaggaaatgtggtaaatatatatatatgtatatgtatgtatacatatatatatataatggaatattactcagccataaaaaagaatgaaatcctgttctatgtggcaaaataaatagaactggaggacgttatgttaagtgaaataaaccaggcacagaaagacaaatatgacatattctgactcatatgtgggggaaataaaattgatctcatggaggtagtgaatagaatgctggttaccagaggctgggaaggatagggggagggagggatgaagagagttcggataatgggctcaaaaatacaatgagataaaatgaataagatctagtgttcaataacacagtagggtaacaaaagttatcaagattatatagggtatttcaaacagctagaagagaaggtttggaatattcccacacaaataaatgaaaaatgtttgaggtgatgaacatcctagttaccctgacttgctcattattcattgtgtgcatgtattaatttatcacatgtatcccataaatattgcaaaaattatgtatcaattaaaaaatcaccaccgtggactaaggcctgtccatggtgctgaagtgcatgtcaggtctgtgaagagacctgatgctacctaatgtaggcaaggctgacctcaaagtatattaatagaataaatggcagccaagctttgtgtattataagtgaaaaaggagaccccaactgggtcatgccctgcccactgccccacataaggactggttatatatttattttatcactcaatcatctcttagcatatgacacatgttagggacaatgctggtaacagagaaaacagaactagtgcatatgtggtcatagcgttccacattcctcacagtctgtgggttttctgaaggtgcaaagctgacaattgctgtttatattttgtttccccaatggtttagagcagtgcctgaacataaaatgtattgattgctaaataaatgggatttctggagatcctggcaaaatcagagcatattgaaggatgaatcagaaaaaaaaagaagtaaggggaaaatatgggagaaaggcagaaaagattggaagaaggagggggagaacatcaaagagaggcagagtccattcacacagaaggagattctaggagagaaacagagaaaggcagacagtctggctccagccaccttggcgtttcaccttccctgtattgaataaagttcaggacctttgcaggtgcagctccctccacaccctgagtcttcatgtggctccatcttgtctccaaccagtgctctgaacagagttcaccacccaagggagccctctctgactgctgtcccccgagcacctgctttgttcccttcttgaggttggtgctttctttattcactttctgtttactgctttctctccattggaatataaattccttagagtatgataaaaaagatggacctaaagttgtgagtttttattggtcctaggtttcttactggaggttagataagtccaaaggacaacaataacaaccacttctcactttcctgtgtatcattattaaaagtattatcttcctgcttctactcttacttgggaaataagaataaaatgataatggggtaagagagttggaggatacaggatagaaatgcagttatgcagtaggaattcatttgaagggagagaatgaaggaggtaattttccaggcactgctcagcatccttggagaggcatcatcatgaaattacagagagaacaggcagtggagaaggagctgtttctccccaaccacatgcatctgcaagagtgaggagtggaacaggcagagccagagaacagcagagttgaggttttccaaggaggtacatgcagcagaatatgcaagagattcgagtgtgtccagaggaatttatcctaacaattgaccatggaaggtgaccagatgggtgtgaaggtcagtgaaaaatggttaaataaagacagtgttggtctccaaagaataacgggatgtagtccttaggtgagaaagaggagtcacttggaaagtaggacgtgatgttggagatgggatgctagaactgaaggcttggagtgattttaggctaatgggagtggatggctatgggcatttggacaatagccatggaggagagagggtccctatatagctagtcaggagtgtcaggagaatcatctccattagggattatctaccctgacattattgaaaatatgatttagatagttatttgtgttgcagggaaggctgcattctgcattgtacattgttgtgtgtggaatatggtctagatagttatttgtgttgcagggagggctgctttgtgcattgtacattgttgtgtgtgaaatatggtctagatagttattggtgttgcagggagggctgctttgtgcattgtgcactgttgtgtgtgaaatatggtctagatagttatttgtgttgcggggagggctgctttgtgcattgtgcattgttgtgtgtgaaatatggtctagatagttatttgtgttttggggggagggctgctttgtgcattgtacattgttgtgtgtggagcagcactctcgcttctacccagaggatgtcagtaattctcctctacttgtgtccagacctcgccaactgtctcttgggggcaaagtcactcctagaataaaaatactaatattatatattagtatttaacattttcagctgttataatcttttaaaaatgtcaacctttgtttcagatacagagggtgcaagtgcaggtttgtgacaggagaatactgcacccagatattgggcatagtacccaataggtagtttttcaccccacaccaccatcccctgtctacgagtccccagtgtctattattcccaagtttatgttcatgtgtgctcagtgtttaactcttgcttataagtgagaacatgcggtatttgattttctattccggcattagtttgcttaggattatggcttctggctccacccatgttgctgcaaaggacatgattttattcttttttatggctgcataatattctatgatgtctatgtaccacattttctttctttctttccttctttcttttctttctttctttctttctttctttctttctttctttctttctttctttctttctttctttctttcctttctttctttcttttctttctttcttttctttctttctctttctttctttctttatctctctctctttctttctttctttctttctctctttctctctctctctctttctctctttcgatggagttttgctcttgttgcccaggctggagtgcaatggcgcaatctcggctcactgcaacctctgcctcccaggttcaagcaattttgcctcagcctcctgagtagctgggattacaggcacacgccaccacacctggctaatttttgtatttttagtagagatggggtttctccttgttggtcaggctggtcttgaactcccgacctcaggtgatccacccgccttggcctcccaaagtgctgggattacaggcatgagccaccacacctggctcacattttctttattgaatccaccattgatgggcacctaagctgattctatgtctttgctattgtgaataacatgacaatgaacatatgagttcatgtgtctttttggtatagtaacccattttcttttgggtatgtacccaataataggattgctgggttgaatggtagctccattttaagttcttttagaaatctcaatactgctttctacagtcactgaactaatttgtattcctctcaacagtgtataagtaagtgttcccttttctccgcagcctcaccagcatctattgttttttgacttttaatagtagacattctgactggtgtgagatggtatctcattgtggttttgatttgaatttctctgatgattaatgataaagagtgttttctcatgtttgttgaacgcttgtgtgtcttcttttaaggagtgtctgttcgtgtcctttgtccattttttcattgggttatttggtttttgcttgttaatttaagtttcttatagattctggatattagacctttgtcagatgcatagtttgcaaatattttctcccattctgtaggttgtttgctctattcagtttccctggctgcacagaagctctttagtctagtagggcccacttgtcacatttcctttttgtttcaagtagttaatatttattttctttcttttcagatagtgtcttgcaatgtcgcccaggctggagtgcagtggtgcccctcctgttgtgaatgtgagtaacaaaccatcttttcaatggcagtctcctgctgacctgtctacctgttgtgtgtgaagctgtgtgattcaaatcagcttgaattacatttttgtgagttctggaaaacccagacaccatctgttcttgtgtgcgagtgtgtgtgtgtgtgtccgtggttgaggaagtttggaagacaccccatggtcaaacaaggtggagtctagggccactttccctgccacatggctatcttattagaaccctgcctaccacaaatgcccaatcccaagggtaaggcaagacagcagccctggaatccctcctttggacggttccaggacccttctccttggatgctcagagatgggatgaagagcaggtaagggaggcgtgggctcagggccagaaagcctggtaacctccccttcctgagtcctgtgtcctcctctgtaaaatgcagacactcctgggatgtcactcacagccagggctgctgggcttattgtactctgcagttaggctcctgtctgaggagatgaaaggatgtgaaatccagcctgtaccatcttcacaagctgtatccatgcctgggctgcaggatttcaaccacagcatagcattgacctgtccaaaagccccaaagcctatcatggccatgtatgcagttattgctacttgggaaaaattcttattaaacagaaaacaagcataggtgaagatacccattttgaaacaatcttattttttatcttttaatttgaggtgatgctcattgtcttataaggggcctttgccatcactagatggcattcttgcatcatggaaaactacacaggagctcctttaaaaatcaattttgaactgtggcaaaatacacatcacataaaatttaccatgttaaaattgtacaaagtacaattttaaaacgaatattgaccatgaccataggtttataattttaaaaattatttatgttttcagttatttttcaactttttattttttaacttgcattttaagtccaagggtacaagtgcaggtttggtatataggtaaactggtgtcatgggggtttgttgtacagatgatttcattacccaggtattaagtctagtacacgttcgttggttttcacaatcctctccctcctcccacccttcaccctccaatgggccccagtgtgtgttgttcccctctgtgttttcatgtgttctcatcatttagctcccacttgtgggaaacaacaggttgtgtttggtttctgttcctgtgttagtttgccaaggataatggcctccagcttcatccatgtccctgcaaaggacatgatctccttctttttttatggctgcatagtattccgtggtgtacatgtaccacattttctttatccagtctatcttttatgggcatttaggttgatttgccttttcgaaatatgctaacaggcatataaggtaactgatcactataattatttttacttgtatagtccactggtgtgaagggcattcacattgttctgccacagtctccacaaactatgtcccatattttgttaatcttgcaatactgaaactctgtgtccattaaaccataactccccatttcccctcccctatcccctggcaacctccattccactttctgttcctgtgaatttgactattctacgtcgaatctattatacttctaatatacaagtgaaatcatacagtttctgtccttttgtgactggcttgtttcacttagtgtaatgtctcaaggttagctcatgttgtagcatgtgtcagaatttcctttctttttaaggctaatagttcgttgtatggacagaccacacttaatgtccctctttattctttgatagataccaggctttgctgccaccttgactattatgagtcatgttgctatgaacttgggcatgcaaatatctcttcaagaccctgcttttttttttttttttttttttttttttttttttttaagacggagtcttgctctgtcacacaggctggagtgcagtggcataatctcggctcactgcaacctccgcctcccgggttcaagcaattctcctgcctcaccctccccagtagctgggactataggcacatgccaccacgtctggctaattttttgtatttcagtagagacagggtttcactatgttgcccaggctggtcaccaactcctgagctcaggcagtccgcccacctcggcctcccaacgtgctgggattacaggcatgagccaccgcgcccggctgaagaccctgcttttaatgctttgggctcatatacccagaaacagagttgctagatcatatgggaattttatttttacttttttcagaaacttttatgtagttttccgtagtggctgccttatatcacaccctaacaacagcacaaaagttttccaatttctccaaaacctgccaatacttcttatgctctgtcttgtggatagtagccatattattgagagtaacgtgatttcttttctctttggaaaaaacatactatttatttcacttttcaatatagcttaataataggagctatgtgcctgttgggcactgcacgacttctcacactttggaatcagcctggaaaatgtcatcctcagttccttgtctttgctgacttttaggtggtacttgctgttcttcacagcgaccactgacaacccagcatcacaaatatgtgatgtgagcaaaaggaaatgtagagggatctaatgtggagactgtgagcctctggagctggtagtttgtgtgatgcatgatgatatagaatattgctgtggttcctttccatcgaaaatatagctattcctctgccgacatttgcagctgtgagaacagaacggcaggaatgcagtaggtgttcattggaggggtcgagtggaggagctcatctggttgccaggcattgctcagtgtccttggagatgagttgccatggaaacagtgaggggcagagaggaggggccgttcctttctagccaagtgagctgcagagacgaaggaaagtgaggcggacgtcccacaatgtcttaaaaatcctctcccattgacacattcagatggcctccatttataatttcatgtatatctgttctgcctgtggtttccaaaaagcagttcaaggcctgctaggggaatcaagaccctttcagtgttccaaactatgtttctaagatcagggaaattgtatttgcttttttccttcccatttcctctgcatgatgtaatattgcaggtgtttgaattaagtagtctatccggccagcagttttttcatggggaaaaaaaaccagaacagaattaaaaaatcagagcatgtggcttagagtaagtgccattcctttaaactttcacttcagttacacagacatttactcacagacacacacacttgcatgtgcactggatcaacatggagaaggtgtgggttcctggggcctgcagtgaccaatttttttttttttttttgagacagagttttgctcttgttgcccaggctggagagcaatggcgtgatcttggctcaccacaacctctgcctcccgggttcaagcaaatctcctgcctcagtctcccgagtagctgggattacaggcatcccagccactatgcctggctaattttgtatttttagtagagacggggtttctccatgttagtcaggctggtctcaaactcctgatcttaggcgatctatctgccttggcctcccaaagtgctgggattacaggcgtgagccaccacgcccggccttgcagtgaccaaagtttcagtggtgctggtgtgagccaagcttccaattttcacagacacggactcaggggtgatgctgcagctgcagtagttgatagctcagggcccataaccaaggggatcttttcctccctgctttttattatggaaattctcaaaaatgcacaaaagtagacagaataatgtatacccactgtgaaagcattcagctatcttctcctttttttccttctagtttaagtaaagtaaatcccagaaataatataattttacctacaaatacctcagtacatatgtctatcagatcataatttaacataatatattaaaggaatttgcaaaaatgtaaaataatgccacctgtattactattttttttgtttggaatatgcagtgtaattattgttcaaaaaagtgtgttatgataatacacaatagatttattgcaaaatttattattttattttattcatctattttgagatggaggcttgctctgtcacccaggctggagtgcattggcgtgatcttacctcactgcaacctccacctcccaggttcaaacgattctcctgcctcagcctcctgagtagctgggattacaggcacccgccaccatgcccagctaatttttgtatttttagtaaagatggggtttcactatgttggtcaggctggtctcgaactcctgacctcaagtgatctgcccgcttcagcctcccaaagtgctgggattacaggcgtgagccaccgtgccacaatttttataattttaaacttaatattttcaaatgtcaatgtataatatggcaaatatacatagatacaaattgtaaccaacaaaattaatcataattccttatttatcatttaatatctagtcctacatttctggggaactttataaccttttctaaaattttaagcaatgcaagtaaattacatcaatgcaaaaatatttaactttgttcaagttgaaatcacgggcacctagtggggcaacctgaggcagaggcagcagacgctgggatccacaactgagttaagaccacaaggcaacttcctcaggctgcaaatcccaacccgagccgacatgaaaatgctcacaactgagaatgatggtttccagcttcatccgtgtccctacaaaggacatacacatgtatacataggtaacaaacctgcacggtgtgcacatgtaccctagaacttaaagtataataaaaaaatacatatataaaataaaaataaaaataagggccgggcgcagtggctcactcctgtaatcccagcactttgggaggccgaggcgggcggatcacgaggtcaggagatcgagaccatcctggctaacacggtgaaaccccgtctctactaaaaatacaaaaaaaaaaaaaaattaggtgggcacagtggtgggcgcctgtagtcccagctacttgggaggctgaggcaggagaatggcgtgaagctgggaggtggggcttgcagtgagccgagatcgcgccactgcattccagcctgggcggccgagcgagactctgtctcaaaataaataaataaataaataaaacttttaaaaaaagcttgaaacctaaaaaaaaaattaaaaaaaaaaatgaagatatgctaacaccacccccccccccccccgccaaaaaatgctcacaactccatttaagcgtacatctgagtttcttacggaagggaattacatctcgaggggatagtggcacaatgcgggggactgggtctatttcgtaggtaggagccttattctccaaactccaaatcaggacttgcaggctgaaaactaccgtttactctgcagacatcagggcaggagagcagcccccagctgatcacctctacaccccaggcccccacctctgtcggccagtggacttctctgtcaatgtgctcattgcttcaggtgaaaccagcactgattcatgtccccgtcagctcctcaaggccctcagctcttcctcaatggaaaccaaaaactatgtgagtctggtctcaatcacttgagaagtttattggccgggcctggtggctcacgcctgtaatcccagcactttgggaggccgaggcgggtggatcacctgaggtcaggagttcaaggccagcctggccaggatacacactgccacattactacaatgctattgttctggctgagaaaacaatactccagaagcaacctcagacacaaacgtttttccttgaccatctcctatcctcctgtcattcagccccattcttcccttgggctagccatagaaactagaatccctcctttaaggtgggcgatagaaaccagaatgccttttccccaaagccagttataaaatccaaaaatattactttaattttccatccatccttctgttgaaaaactggccataaagaaacctggctgggcgccggtggctcatgcctgtaatctcaggattttgggaggccgaggcaggcagatcacttgaggccagcagtttgagaccaacctggtcaacatggtgaaaccccgtctctactaaaaatacaaaaattagccaggtgtggtggctcatgcctgtaaccccaactactcaggaggctgacacacgagaatcccttgagcctgggagacagaggttacagcaaatgctgagattgcgccactgtactccagcccaggagacagagcaagactcagtctcaaaaaaaataaaaataaaaaaataaaaataaaaaaaatgtctgatctaccttgtccgactgtaggttacaagaccctcattccagagagtgtccctgcacaaagaggccaaggagaatctaagcagacaaacctcatgggtttccccactcagtccactagcattaaaccagacccttagcatccagtatttctacgtggctctccacactttgtagaacctaagcataaaaatgggcaatttctcccgtatctttgggtgttcattcttaaagttcccatgcgtacatttgtttttttttttttttttttgaggcagggtctcgctctgttgcccaggctggagtgcagtggtgtgatctcagctcactgcaaactccacttcccgggttcaagagattctcctgcctcagcctcccaagtagctgggattacaggtgcacaccaccacacccatctaagttttgtatttttagtagagatggggttttagcatgttggccaggctggtctcaaactcctgacctcaggtgatctgcccaccttggcctcccaaagtgctgggattacaaggttgagccactgcgcccggcctccatatgtacgtgttaagtaagcttgttataccttttctcctattaaccaatctgctttatgtcactgattttcagtgaaccatcaggaggccaagggccttggcccctacaccatcccattgttcctatggctttgaattctcatgggaaatgtaatccaggcctgtctgattccttgatttgccaggctgcctaccctgattaacccagcgaaggaatttcaatggcaagtgtgcttggactccagtgacccgggcttgtcgagatcgcctctagcataggatcagtttagaattctcagaagagaaggtaacatgtagattcccaagattacaaatcctaactttcattatgtgggtgatcatgggctagacacctcccttttctgagcctcattttcttttttttcttttttctttgtttgttgttgatgttgttttgaggcagggtttcactctgtcacccaggctagactgtagtggtgtgatcatggctcactgcagtcttgacctcctgggctcaggtggtcctcccacctcagcctcctgagtagctgggactacaggtgagtgccaccatgccgagctaatttttgtattttcttgtagatagggggttttgctatgttgctcaggctggtcttgaactcctgggcccaagtgatctacccacctcagccttgcaaagggctgggattacaagtgtgagccaatgcgcccagaccctctgagcctcatttgtttttacctgtcaatgagtgatagacatgggtaaaattttgacacaatgcccaatacattgtaagcaattaataaatattagttgggtgtttttgtatttctaacataatataaaatacaattttaatttagtaatatgagccaatgagtgttagaaatggtaattaccttctttgtgatgttttctccatccgctgctttcacaattgttacaagctccacctcaacactgtcataataatagtgctagtaggccgggtgtggttggtcacgcctgtaatcccagcactttgggaggccaaggcgggtggatcacaaggtcaggagttcgagaccagcctggccaatatggtgaaaccccgtctgttctaaaaaaatatagaaattagccgggcgtggtggcaggcgtctgtagtcccagctactaaggaggctgaggcaggagaatcgcttgaacccgggaggtggaggttgcagtgagccgagattgtgccaccgcactccagcctgggtaacagaacgagactctgtctcataataataataataataataataatagtgctagtactcttgtccacatctctcatggtgatgtaactgactgcctgtttcccacaccactccatcagaatttgggctgtgtccctaaaacctgtattaccagcattttgcacttgtaaaccaggtaaatagttccctggttaagcacctgatttaaaaatcagcacagcccagccattgaccacgacctgtccatggttctgaaaggcacgtcgagtctatggactcaccaactggcaacggagattgttgatgctaacttgtgcaaaggtgacctcaaagtatatttctgtagggtccagccccacagggtcggtgggtctctccccatgtgtggagacgagagagtgtagaaataaagacacaagacaaagagataaaagaaaaggcagctgggccagggggaccactaccaccaagtcgtggagactggtagaggccctgaatgccaggctgcactgatagttattggatacaagacaaaggggcaggataaggagagtgagccatctccaatgataggtaaggccacgtgggtcacgtgtccactggacagggggcccttccctgcctggcagccaaggcagagaaagagaggagacaaagagaaagacagcttgcgccattatttctgcatatcagagacttttagtactttcactaatttactactgctatctagaaggcacagccaggtgtacaggatggaacatgaaggcggactaggagcgtgaccactgaagcacagcatcacagggagacggtcaggcctccggataactgtgggcgagcctgactgatgtcaggccctccacaagaggtggaggagcagagtcttctctaaactcccccggggaaagggagactccctttcccggtctgctaagtagcgggtgttttcctttgacacttacgctaccgctagaccacggtccgcctggcaacgggcgggcgtcttcccagacactggcattaccactagaccaaggagccctctggtggccctgtctgggcataacagaaggctcgcactcttgtcttctggtcacttcccactatgtcccctcagctcctatctctgtatggcctggtttttcctaggttatgataatagagcgaggattattataatattggaataaagagtaattgctacaaactgatgattaatgacattcatatataatcatatctaagatctatatctggtataactattcttgttttatattttattatactggaacggctggtgtccttggtctcttgcctcggcacctgggtggcttgccacccacgtatttcaggaataaataaaagccaaattttgttgtgttgtaaccaagaagagaaagccccaatttggtcatgtcctgcccacagccccacataaagatgagttaggtgtgtgtttctcacatcaacagccccttagcatgtgccatgtgttatggatactgctgggatggaggaaagatggcagaaatagtgcatatataatcctgcattcaaaactcctcacagtctgtgtgatagaaagaatgaatggcagggcgctgtagctcatgcctgtaatcccagcactttgggaggctgaggtgggggatcacttgaggtcaggagttcgagaccaacctggccaacatggtgaaaccccgtctctactaaaaatacaaaaattagccgggcttggtggtgggtgcctgtagtcccagctattcaggaggctgaggcaggagaatcgcttgaatccgagaggtgcaggttgcagtgaaccgagatggcgccactgcaatccagcctgggtgacagagcaagactctgtctcaaaagaaagaaaagaagagaaaaggaaaagaagaggaagaaaacaaaagaaaagaaaggaaagaaaaggaaaggaaagaaaaagaaaggaaagaaaagaaaaggaaagaaaaggaaggaaagaaaaggaaaggaaagaaaataacccaaaataatgggcttctgaggttccaggttgttaatggggattgaataggtccaaaaaacccaccaaaacaactatatcttctttcctgttgaacatttaaaaatattcttttaacatttctacttttgtatgggaaatagaaatctgatgacaatggggagagagtgttggaggcttcaggatagaaagcctgcagtggactatgtattcattggagaagagaatggaggagctggcctggttgccaagcaacgctcggtgcccctgagattggagatgactcaccaggaaattagagtgagcgcaggcagtgagggagaggctgttgtgccccatcaagagcagcttcaggacaaagaaaagtcatgtgaatgtcctgcagtttctctaaaaaaatagcctgtttgttgtacattcagatgatctccatttataactttatgtccattacttttatatatcttagcccactagttccaaaaatgtagtttaaaaacttctggtggggcgggggcgggaatcaacttccttttaaagggtccagaattccaaactattgtgctaagaacgttaagattttattttcctatttccatctcattttcttcatgatgtagtattgtgagtatttgacttactgaatttgagaatctgtcttgtattaaagggttttattgcaaaaatatgaagcaatgctacctatattactgtgttttgtttggaaaatataatcgttgttcataaaaaacatgtttgttaacaaataataggtttgttacattttagagttttaagtttagaattttctgagctccaatttataatatggtaactgggtaaaaaatacaaattatgcaaataaaaattatctgaggatccccagttactttgaaaaatataaaagtggactgagatttaaaagtttcataattgctctcttaggttaagtacctaggtatcatctgattgggtggagtaaagcacacctttaatgtttttgacacgtgaattctcgttgctgaagtgatagacagctgttcctctagctccaaattctcacgggaaatgtaatctaggtctgtctgactttaattaatttgtcaagttataaaatcaacctaagtgaccatcaacagatgaaaaacgtggtatatatatatgtgtgtatatatatatatatatatatatatatatatatatatacatacaatggtttattattcagccatgaaaagagtgaaatcttgtcatttgcagcagtgtggatggaactggaggacattatgttaagtgaaatgagccaggcacaggaaggcaaatatcgcatcttctcactcatacatgggcgctgaaaaagtagatctaatggaggtagaaagtagagtgatggtttccagagactgagaagcagggaagattgggcaatgggtaaaaatggttaaacagaaggaataatgtctagtgtttcatagcacagtagggtggctatagttccgaagtatttatagtatatttcaaaatacctagaagagaagatgtggaatgttcccaagaaaaataaatgagaaatgtttgggtgatggatagcctactcaccctgatttgatcgttacacattgtatgaatgtatcaaagtatcacatgtaccctatcaatatgtacaactattatgtgtcaatttaaaaaatcagtgcagtcccatcaccgataagacctgtccatggtgctaaaaggcaccttgagtcttgaactgatggcatatgccaagtgtttggaaccatactggatacagaggaatgaatgcctgtatgatccatgcatttaaacttttttacaatacatgagtattctgaaggtactaagctggctgttacaaggttcatattcttatttttccaatggtctagagaattacctgtacataacgtgctgattgctaattaaataggattctggagaccccaacaatattagactatgttgaaggaaggataaaacaaaaataagaaagagaggggaaaatagggagggagtaaaatggaagaaggatgaagataacatcaaagagacagagcagagtccatgcagacagaaggttttctaggagagaaatagggagaggtaaacagtttggctccagccacgtgggccactctcttttcttggaatgaatcatcctcaggacctttgcacatgcagttccttccatggctctgggtcttcatgtggctccttcctgtctccattcaggattctgagcagagttcaccacccaggggagtcctcactgattgccaccccgaagtacttgctttggttccattatgaggctgacacttcctttttaaaaaaaatacagtctcactctgtcacccaggctggagtgcagtggcacgatcatagctcactgcagcctcgaattcctgggctcaagcaatcctcctaagtaactgagaccacaggtgcacaccaccacacccagctgattttttctttaagacagagtctactcactctgatgcccaggctggagtgcaatgccacaatctcagctcactgcaacctctgcctcctgggttcaagtgattctcttgcttcagcctcccaagtagctgggattagaggcatgtgccatgaggcttggctaatttttgtattcttagtagagatggggttttgatatattgatcaaactgctctcgaactcctggccccaaatgatctgccttcctcggcctcccaaagtgctgggaattacaggcatgagccattgcactaagccccagctgattttttctatttttagagatggggttttgctatgttgcccaggctggtctcaaactcccgacctcaagcaatcctcctgtctcagcctcccaaagcatggggattacaggcataagccactgcacctaaactgatgcttcttttccttgcttactgtttgtgctcttccttgcctggaatgtaagctcagagtgtggtagaaaaatatacctaaagttgcaagtatctcaggttttaggtttgttactggagatagaagaggttcaaagggcaaaagtaagaattgtatctcatttccttttggacatcattaaaaatattatcttaatcttgttacttttgtttgggaaataggaataaggtggcaatgggaatgaaagagttgaagtcttaagatcagaaaagtctgccgggggcagtggctcacgcctgtaatctcagcactttgggaggctgaggcaggcagatcacttgaagtcagaagttcgagaccagcctggccaacacggtgaaaccctgcctccactaaaaatacaaaaaaattagccaggtgtggtggcgcgcacctgtaatcccagctactctggaggctgaggcaggagaatcccttgaacctggaaggtggaggctgcagtgagctgagatggtgccattgtactccagcctgtgtgacaagagtgaaaaactctgtaaaaaaaaaaagccattatgcagtggtcatgcattgaagtagtggtgtgcatagaggagctggtcctgcttccaggctgtgctcagaatccttggaggtgagtcaccatgaagtgagggtgagaacagcaacggggtagcagctgttcctttctagccaccaggagtgaggagtaagggggagggcaagggtagtcagagcccaacagggatggggttttccaagagaatcacatgaaacagactatgaaagtggagtgtgtgcagaaagaatccatttcacagattgaccctagaaggtgacttggatgtgggagtgaagttttgataaaaatggtggaatcaatggagcattggtccttaaaggataaaagaatgttggtatcaggagaggaggataagtcatctgttaggtaggatgtgatgttggagatgggaatgggatgctggaaatgaggggaatgaatgatcttggttattgataagtcatctgttaggtaggatgtgatgttggagatgggaatgggatgctggaaatgaggggattgagtgatcttggttattgataagtcatctgttaggcaggatgtgatgttggagatgggaatgagatactggaaatgaggggattgagtgatcttggttattgataaatcatctgttaggtaggatgtgatgttagagatgggaatgggatgctggaaatgaggggattgagcgatcttggttattgataatgacaaggcaggtaggagcgggtggcttagggagattgaacaaaagccttggaggagaggaggtcaatatggtgatggtcaaacatgttgggaggatcatctgtatcatgtattctcttccagggtaacactgaaaatttggtaggatattctttgttgtggcagggagggttgtgctaggcagtgtgggttgctcaggggcattcctggattctcagcagctctccactcctgtgatgactaaaaactccttcagacactgccaactatctcctaggggcacgagggctagcccaagcctgagggtggaacaacacagaagccctggaaaccctgctctaggaggtgccagacccctctccttggatgtcccgagacaggctggaggagcaggtgatgggggtgtgggctcaggaacaggcagcctggagacctcccatctctgagcccagtgctttctgtaaaacatggacactcctaggaacttgctcacagccaaggctgctggggatggttgtgtgtattttcccctgcagttagattcctgtccatagagctgaccagaatttgaaatccagcctgcactctctctacagttatgcccacaccctagctgaagaatctcaccagagccataccactgaaactgtctttgcaaaaattacaacagcaaaaattatgacagtgaaagagatctgatctaaccgatccccatcttgcctttaacctccaaagtgcctagatcagtgctgagtttaggccaagttaatctggggagaggttttaattcataatttaagtgatagtagcccttccccccaaaaaccaaaactgcctttgtaaagctaaagaaaggccaccaggttaggaggatgagcctgaattctgctcaggtgtagacttaaatggtaaccaggagtctggaggtcataagatttgccacttccacaattacctctgcagataacatcgctcttgtagaacctaagattggccttttgaaatgtcttttcaggtttttgcatttccgatggccagtggctccattcgaatctgtcaacccaccaactggtcctttagccccacccagaagtggagtccctggcccaccaaactagccttgaaaaaccctaacctttgaattttcaagaagattgatttgagtaataactgtctcccacgctgcgtggccagcctcatatcaataaactctttgttgtagtgtcatggcctcagtgaattgttttttgcttgtttgttttgttttttcgttttcatttttgtttttgagatggagtcttgctttgtcgccgaggctgaagtgcaatggtgcgattgcggctcactgcaacctccgcctcctgggttcaagcgattctcctgcctcagcctcttgagtagatgggattagaggcacccaccaccatgcctggctaagtttgtatttttagtagagatggggtttcaccacattggtcacctgctctcaaactcctgacctcaggtgatccgcctgcctcagcctcccaaagcgctgggattacaggcatgagccaccgtggctggtgtctcggtgaattgcttttttctgtgcagtcagcaggaagaaccagcccatcaggaggttacaccattgcagatcaatccaaagtcctacagccttccgcggccacgtgctcattaataaaatttggggcacaaattcttttcaaagaacaaacaagaaagtgacacagcaatttttagggtctcatttttttatctttcttctcatttgatgcaatgcgtatgattttatcaaatgctatcaagcccatttgccacagctagatggcactgtggaagcattcgaaagtaaataggcattcctagttaaaaatctggcaaactacacaggatataaaatttaccatatactccatattttgctaatattaattcataagcaaagactttcaagtttgttttaaatttttgaataaaaatgggttaaattattacataattcaatatttatattttaatcatttttaagtgtgtaattcagtgtcattaattgcattcacattattcacaaacatcaccaccttccatacccagagtagttttcatattgcaaaaccggaattctgtactcacgaaacactaactctccgttccttctctcttcgcccctgggaaccgccattgtactttctgtttttataaattagactagcttgggtaccttatggaagtggaatcatagagagttgtcgctttgggactggcttattccccttggcatcgtgctctaaagttcttccgtgtcgtagcatgtgccagggttttatttctttgtaaggctcagtaatattccatcgcatgcaaaaaccacagtttttttttttgacagagtcctgctcttgtcgcccaggcacgacctcagtgtggcatgatcattcagtggcacattctcagctcactgcaacctcgagatcgctcagtggcacgaactcggctcactgcagcctccgcctcccgggttcaaacgattctcctgcctcatcctcccgagtagctgggattacaggcgcccgccatcatgcccggctaatttttgtatttttagtagagacggggtttcaccgtgttggccaggctggtctcgaactcctgacctcaggtgatccacccccatcagcctcccgaagtgaaaaaccacagtttgtttacccattatccactcctcccttgatggacacttcagtttctctacttttgactattatgaataaagctgctataaacacgagagtacaaatatctctttaaaacactgttttcaatttttgggggtatatacccagatgaggacacaggtggatcatctggtaactttattaagaatttaacggaaaccatctcacttccaaagcccctgtaccacatcacattcccaacaacagggcggaaggcttcttatttttccatagcctgccaacacttgttatattctgttttatggataatagccatgttaataatgtgtggtggttccttctttctcttaaaatctattttttcgatttttcaacaatgacaattattgaataatgggatatgtgtgtctgctgggcaccgtgcaatttctcgaactttcgaatcagatggggccatgccaccctcactcctcattctcactgattttcactgggggattgcttttcttcacagcaagcactgacacctcagcttcacagagacattgtgtcagcccaggaaatgtagagagaccaaatgcagaatctgtgaaccattggagctggtagtttccgtggcctcggatgcggaatgttgctgttctcccctcaattttaatgtatccagggatcctctgcagacaattgcaggtatgaagatagaagagcaggaaggcagtaggtcttcattgcagggggagagaatggaggagctggtctggttgccaagcaatgctcagtgtctttggacatgagtcaccatggaaactgagtgacaactggcagtgggggaggggctgttctgccccagccaaatgcagctgcacagaatttaaaaagtgatgtggatatttcacagtttcttgaatcaataacgtctcatttgtacactctgatggtctccatttgtaatttcttgttcattattggtgtatctcttaggccagtaatttccaaatgtagtaaatcaagatctttgtaagggttccacaacttcaaactatttttctaaaaacattaattttattttattttattgatttttttgagacaaggtcttactctgttgcccaggcaggaatgcagtggtgccatcacagcttactgcaaccgcgatctcctaggctcaagtgatcctcccacttcagcttcctgagtagctgggactataggcacacacctccatgcccacctggtttttaattttttaatttttagtattttttatttttagtagaggtcttgctacattgcccaggctggtctcgaactcctgagctcaagcgatctgccctccttggcctcccaaagtgctgggattacaggtgtgagccactatgcccaaccagaacattaatattttatttggcttttttccttctcattttctctgcatgatataatttatgagtagattgaggaaatctatctctcttctatttaggaggaaattaaagggatttgcaaaaatgtaaaacaataccacctttacctttactaagattttatttgaaaaatattaatgttgttcataaaatgtgggttcttttaacatataatagatttgttgctgtttttaagtttaaaattgaacaatttctcttcttttatttataacatgactaatataggatatataaactgtagaaagaaacattcttcggggatttctcaataatatttaagagtattgggattctgtcgatgacacaaatggagggaaaatcattccatgctcaaggattggaagaatcaatatcattaaaatggctatacaacacaaagtaaactacagattcaacgttattcctatcaaatgaccaatgtaattcttcacataattggaaaaaacaatctgaagcagcaagaacaaagttggaggtatcacattacccaacttcaaactgtaagactacagtcgccaaaacagcagggtactggtacaaaaacacacgtagaccaatgaaacagagcagagaacccagaaataaagctactcacctacagccgtctaatctttgacaaagttgacaaaaaaaaaaaagcaatccaaaaggactctctattcaataaattgtgctgggatcactggctagccatatgcagaagaataaaactggacccctacatttcaccatatacaaaaattaactcaaggtggaataaagatttaaacgtaacacctcaagctatacaaatcctagaagaaaatctagaaaacaccattctgaacttgggccttgggaaataatttatgactaaattctcaaaagctattgcaacaaaaacaaaaattgacaagtgggacctaattaaactaaagagcttctgcgcaagaaaaaaactttcaacagagtaaacaggcaacctacagaatgggagaaaatattcacaaactgcatctgaaaaaggtctaatgtcaaaaaatctgtaaggaacttaaacaactaaacaaggaaaaaccaaataaccccattaaaaattggcaaaagatatgaacagacgcttctgaaaagatgatatataagcagccaacaaatatatgaaaaaatgtttataatcgctaatcatcagagtaatgcaagtcaaaaccacaatgagacatcatctcacacgaataagaatggctattaataaaaagtcaaaaaacagtaatcgctggtgatgctgtggagaaatggaaacacttacacactgttggcaggaatgtcaattagttcagtcactgtggagagcagtttagagatttctcaaagaacttcgaacagaactaccatttgacccagcaatcccattactgagtatatacccgggcatggtggctcacacctataatcccagcactgtggaaggctaaggctagtggatcacctgaagtcaggagctcaagaccagcctggccaacatggtgaaacaccgcctctactaaaaatacaaaaattatccaggtgtggcggcgggtgcctgtaatcccagctactcgggaggctgaggctggagaatcacttgaacccaggaggcagaggttgcagtggagattgcgccactgcactccagactgggcaagaagaatgaaactctgtctcaaaaagaaaaaggaaattgagaatacaatgactaaaatttgaaatagataatgtaaccaacttttccgttatgtttggggtcattgctatggcaacaataaaagggttccctatttcccatcagtcttaagcaagatctagtggcaacctaactgatactgctggcacttaaaaagcaaagactaggcgtggtggtgtatgcctgtaatcccagcactttgggaggctgaggtgggaggatcacttgagctcaggagtttgagaccagcctgagcaatatagcgagactagatccctacaaaagttttaaaagttcactgtgcgtggtggcaaggatctgtgattccagctcccactcaggaagctgagatgggaggatcccattagcccaggaggtcaagactgcagggagtcatgatcacaccactgcattccagccttaatgacagagtgagatcctgtctcaaaaacaaacaaacaaaagccaaaacagcatggtaaaaatattttcatagaagaaaacagtcggccaggcgcggtggctcacgcctgtaatcccagcactttcgaggtgggcggacaacaaggtcaggagatcgtgaccagcctggccaacatggtgaaaccccatctctactaaaaatacaaaaattagccgggcgtggtggtgcacacctgtagctccagctacttgggaggctgaggcagaataatcgcttgaacccagaaggcagaggttgcagtgagccgagattgcaccactgcactccagcctgggtgacagagtgagattctgtcaaaaaaaaaaaaaaaaagaaaagaaaagaaagtcgaaattatttgaggtgtataattgttttcttagccagtatgcatgttttaaatttaggacaatttatcattaactatagaaattataaaggtaattaaacccatattactcatgttctgaaccaagaaagcagcatatttggcattctaaatacttacaaaacataaaagactgctagagcaacaagtcagccttgtaattaaatatgaaaaatcaacttttggttgttgataagttgtatctcatgcttactttctgtttcactgatttctacttttaactttattatttccttccattcttcccctttctttcctttttttgagacagggtctcgctctgttactcaggctagaatgcagtggtgcaatctcggctcactgcagcctctgcctcctgggctcaagcgatcctcccacctcagtctcctgagtagctgggactacaggtgcatgccaccatgcctggctactttttgtagagatggggtctcactatgttgcccacgctggtctcggacttctgagctcaactgaaccacccacctcagcctcccaaagagctgggattacgggtgtgagctattgcgcctggccttccttccttcttgtttctttagactcaattttgtttatttttcacctttttgaaatggatgattaaataatcaattttcagcttttcttgttttctattataggtatttaaggctgtacatttctatctaagcacagctttatataagtatcataagttttgataaataatgttttcattattttgcagtccagatttttaaaatttttattttttgactgatgcattatttagaaatatattgcttaattttctaatatatggatgtttttgagttttctttttgtttttgtttgtagttaatttataccatgatcagaaaccatactccgattcagttctttgaaatttgttgagaattgctttgtgttctgtatttggttaattcatgggtactttatatgattgtctcttctagttattgggtgcagtgttttatgtacaccagttgggccaggtttgtaatcacgatgtttaaatattcttgtttaaaaattcacaatgtttaaaaattcttgtttcttgtttatttcgtttttcagttactgagggaattacgttaaactctcctactaagaatatgaattcatttatttctatttccaaaaagagcatgagtgttctaaaataaaaggtttgaggattactctcctagaataaatttctagatacagtttcactgaatagaaggaaatacaccatttgtggtttctgatacatgatgtcaaattgtgacaatgcttttcagtagtgttcctgggccccgaattctcatggggaatgtaatccagcctgtatgacttttcccaatttgccagcctgcctcccataatagacccagtgatggaatgtctatgagaagcatgcttgggctcctgttacctggacttcaaaagatatcttctaatataaaaacttttagagttgtcaaaagagatggtagattgcatatacctgggtttaccaaccacggccccaacattcattacatggatgattatgagccagacacgtgccctttctgagccttgcttcttgcacctggaaatacaggatgaggttggtaagaacttgacaaaatacattctaggtgcttaaaaaatcattgctgggatttgtttttttgtattttcacaataaatatgaaaacagttttaatttaatgattatgaacaaaaaaggatgaaaaccaatagtcagtttctttgtaaaattttccccagccagtctatcatcaagtgtttaaataattccctccttacaactgttggagtaggtgtcacatctcttgatttccataacttctggtgctgtaactggctgtttgctgttttccctatcaggccataaacttcttgagagtttgtactgtgtcttgacaacctgtttcactagtgctttgcatccaagaagcaggtgaatatttttctggtgaagcccttgattaatcagtacagccccaccattggctgagatctgtccgtggtcctgaaggtcacacttgagactattaactcattcacaggaaagggaggcagctgattctagctgacttgtgcaaaggtgatctccacatacattcgtggaataaagtgaggacaagctttattgtttagtgaaaagggaaggccacaaatgagttcatggcatgtccacaatcccacataaagtctggttttatgtttattccatcactcaacagtcacttagcaaatgctgtgttagggaaagtgtgggggcggggtggaggcagaggaaaaaaaacagaaataatgcatatgtgattcctgcattcaaaatttctcacagtctgttggtattctgaaagtactaacctgactattacatgttcatattctttttgttttttgagacagagtctcactctgtcacccaagctggagtgcagtggcacaatttcggttaactgcaacctccacctcccaggttcaagtgattctcctgcctcagcctcctgagtagctgagattacaggcacgcaccaccatgcccagctaatctttgtatttttagtagagacggggtttcaccatgttagccaggctggtcttgaacacctgacctctagtgatccacctgcctcagcctcccaaagtgctgggattacaggcgtgagccaccgcgcccggccttgttcatattcttgtttctccaattgtctgtagcaatgcctgtacgtaaaatgtgttgactgctaagtaattgtgctatcaggagaccctgaagaaataagactatattgaagaatagataagaagaaatagaaaaatataagagaaagagaaaatatagggaggttgtaatatgagagaaaggatgagaaagtgaaagagaggaagaagagcatattcagatagaaggaaattctaggagagaaatagaggtgaattatttctctctaggagagaaatagaggtgacatgagcctctgtgtgggccttgaatgagccacccccaggacctttgcacgtgctgttcccactgccacccgggtcttcacaagattcctcctgtcttcacacagggctctgatcagaggtcacctctcatggaagcggtccctgactgctgtccccaaaagcccttcaagcacctcctgcattccactcatcatgaggctgacttttatttctccctgtttctgcctgtacttacagtggaatataaactcaatgaacaatggtagaaataagaaactcctgttttgagattcttctggtgccaggagattgttactggagatggaaaaggcccgaaggacaaaaataaaactatacctgatttcctgttaatcatcattcaaaatgttcacttcctggtgtggcgtatgtgaaggaacgaggaataaaatgccaacgggcaaaggagagttggaggtctgagcatagaaaagcaggagatcagtgggtattcctggcagggagagtgaacagaggggctggtcttgtttccaggcagtgctcagcgtccttggagaggggccaccgtgaagttagggtgagagcaggcaggatgagggcaaggctgttcctccccagccacctgcagctggaggactgagggatggagaaggtagtgtcagagctccgcggggatggagctttccaagggaaccacatgaagcagaatataaaaagagattcaattgtgtgcataaagtactgattctactgattgaccatgaaaggtgacctagaggtaaggtcaagatcagtggaagatggttgtatgaatggcgtgttggtccccaagagatgaatggatgttggcatcagatgggaagggggggtcccccggaaggcaggacgtgatgctccagatgggatgcttgaacggaggggatggtgtgatactctttttgtttgtttgtttgtttgttttgttttgaaagtctaagtttattatgggtcaacttgattcttttttattattattatactttaagttttaggatacatatgcacaacatgcaggtttgttacatatgtatacatgtgccatgttggtgtgctgcacccattaactcgtcatttagcattaagtatatctcctaatgctatccctcccccctccccccaccccacaacagtccctagtgtgtgatgttccccttcctgtgtccatgtgttctcattgttcaattcccacctatgagtgagaacatgtggtgtttggttttttgtccatgcgatagtttgctgagaatgatggtttccagcttcatccatgtccctacaaaggacatgaactcatcattttttatggctgcatagtattccatggtataaatgtgccacattttcttaatcagtctatcattgtttattggtaatgacaaggttgatgggaagtggaaggttaaggaagtttggacaggaaatttgggagagaggaaatcaatgtggagatagtgaaaagtggtgggaggatcacctgtgttagtgttcttccacctcagcatcatagaaaatttgggctggaatgttcttttatgcaggatggaggaggccgtcctgattttctagggtgtttgtcagcatccctgcctgctacccaggggatgtcaatagttctcttcagttgtgaccccaaatgtttatccaaacttgccaaatgtctcctatgggcaaaatacccctggttgggaaccacagattacaatacacataacattcacctgtaaattagcgggaagtaatattggtgaggatgacagttcacacccacagaggactaagatcacaaagagtaagggtttcgtgaggatctatgcaccaaccctgtctgtcattttctgtaattctgatccatgacatctgggaccttgctgactccacagggatgatcttgccaggtcttgcctattccgaaagacagcagtcagtttccttgagagggagcctttcacgtggaaatgaatccagagcccacaccccaaccagcttctatggagctgtcacactcagggccactgtgacctgccctgtcacccagggccataaccatggacagccatgggctctgcccagagccactgaaattattccaggtagtcaatcctgagcctgctcgttttgtctcccttgttttttccttcagaaaccataaggaaggctctttgcccacatgctcccccatgagcttctgcctcttgacagacactggggcttcccctgcggcccctcttggcctggtgtgccccctcctcttgtgaatgtcacaagctatttttgttttagtgacagtcatttcctactctttttttattttgttttgagatggagggagtctcgctctgtcgcccaggctggagtgcaatggcgcgatctcggctcgcaacctccgcctcctgagttcgaacaattctccttcctcagcctcccaaggagctgatattacaggcgccagccaccacactagctaatttttttgtatttttagtagagatagggtttcatcatgttggccaggctagtcttgaattcctgacctcaagcgatgtgcccgcctcagcctcccaaagtgcttggattacaggcgtgagtcactgcacctggccctcctgttctctttaattgttttgtgtgaaactttgtgatgcagggaattgcttcccgcaagaattcctaaattccattttgtgagagtccttcaaaacccagaggcattttctcatactacgtgtgtgtgtatgtgtgtgtgtgtgtgtgattgaaggggaattgggagatgactcttgagtctcaggtcatttacttgccccatatttaccttattgggaccctccctaaacccaaacacctaatctcaaggctacagcaaggcagcagccctgaaatctctcctctgggaggtaccagcacccggctgcttggatgctcagaggcaggatgggagcaggtgacgggggtgtgggcttgggaccagacagcctggagacctcccctctgtgagcccaccatcctcctttgtaaaatgcagacactcctaggacctcgctcacagccagggctgctggggatggctgtttatgttgtaccctgcactagggtcctgtccaaggcaaggggaaaaatgtgaaacccagcctgctctccgcagctgtgtccatgcagagctgagggattattttcaggcatcccactgatctatcccacttcccacagcccaccctgtacataggcacagccagtgtaatttgggaaaaactcattttaaacaaacaaaaaaatgtcccagccaatacaacatacccctttaaaaagtacattattgtgtttttcttttcatttgaagcaatgtctatgacattgcaacgtatatataacttaatatttaacattttaaccatatttaattgtacagttcccatattaggtgcattcacattgttttactatgatctccgttgttcatctccaatattcttttcatcttgaaaaactgaaactctgtacccacaaacaactccctacttctccctcacacctgtccctaacatccactttctttcttctttctttctctctctctccctttcttccttctttccttccttccttccttccttccttccttcctttctttccttctttcttttttttctgagatggagtctggctctgtcgcctaggctggagtgcagtgacacgatctctgctcactgcaacctccgcctcctgggttcaagtgattctctgcctcaacctcccgcgtagctgggattaaggctcccaccaccatgctcaactaatttttgtattttttttagtagagacaggatttcaccatgttgaccaggctggtctcaaactcctgacctcaggagatccacccgcttcggcctcccaaagtgctgggattacaggcatgagccactgcgcccagcccactttctactttctgctctattagttggacagcattagagacactaaattattggagtcatagggtacgtcttcttttgtgcctggcttgtttcactgagcataatgtctcagggttcatacagactgtagcatgtggcaggatttccttccttcgtaaggatgaataatatcccatggtattgatagaggatattgtgtttattcattcatactttgatggacctttgggttgcttctacttcttgctgtcgtgaatgctgctacgaacacgggtggacacatatctgctcgagttcctgctttcgattattctgggtctatatctcgaagtggtattgatgcatcatattgttagggaaacaggagcataggagaaccagggtgacaccgttttaaaatctgtccaaaaaaactagcaaggcacattccttgccagccctccaccatggccattaagatgtgtatagctgaggaaacagcttaatcaagcctgcaaggacaaactcctatgagagcaaaatgtctagataccccaatatggcattatatgcttttaagatgattacagttatgctttgatgcatttatgcaccaaaatgccaaggatagctttctttaaatcaacaaaataataaattttgtcatgctgccagcccacctgcacatacacataactttgcttagctattacatagataagacccccacataagtaaaacttaaaacaaagatgaggcattcctctcttggctttctgaggacaccctactctgtatctgagtcactttcagtaaatgatctcttcttactgcactctgcagctcacctgggagcccctcctgcaagagatccaaggaccctctcttcgggtctgaattgataactgttttctggcaacaatatggtaactctacttttatttgtccagaaactattgcactgttttacaaggcagctgcaccatgtgtccatcccactgtcgaaaaccaaaatttccaccagtttatttccactgtgatcagattcaggatcagctgctcgatgctcgaaagccaggcacgggagacaagggttggcagaaggaaagacaggttcaatcagagagccagaaaaccgagaaggtggtgaactagcgttctaaagcaccatcttcaattttagaattcaccatgggggtttcaaaaggaaatttgctgtgggagacatgcggagtgtgcagggtgcaggtctgtgcctttgttctggtggctatcatgggtatcacccaccctgagacctggctggcattatcctgacttcagaggaagagataaaggggtcagatgggagggaaaggaagtgggtgattaaaatatattttaaaaacggaggtccctggcctcacaatgattgaattggcatttgttagcgatttatggatcgggctgcatcccatctagaaatacaaaggcatttttgcccttatggcagaacagttggcgcacttttttgtcttttgtttttcttttgaaacggattctcactcggtcacccaagatggagcgcagtgctgtgatctcagctcactgcaacctctgcctcccgggttctagcaattctcctgcctcagcctcctgagtagctgggattacaggcgcccaccaccacgcccacctaattttttgtattttagttgagacggggtttcaccatgttgcccaggcttgtctcaaactcctgagctcaggcaatccacctgcctcggcctcccaaagtgctgggattacaggcgtgagccaccgcacccggccaacagttggcttttgtagggcttcttgagcaggaacaaagaaacagcaccatacaaaaaggcggctcttttaacgtctggttattttaggttactttccttttaagggttaaagcagagggacttccttctcttggcagctcacgttacttgggtcctttgagatcagatgctgtggatctcttgtgttttgaaaaaaccggcctgtttagggattttcctgtttttccaagtttcagtttgacgacatgcacttaacctgaaagactccatttttatttggtttgtgaagggctagagaaggagctccgtccacaacaacagtctcctatcaacttcatttaaccactaagtgcagaagggttccagtttccccaaagcctaccaccatcctttattttccattttatggagagtagccatgttaataatgtgtgctggttcttttttttcttttcagtggaaaaaatcatatttatttcatttttcaatagtaattatttattagtggtatgtgcgtgtctgttgggcactgcacaatttctcaaaccttgggatcagacgggaccatgccacctgactttcgaaaccttgctgattttcatgtggtaattgcccttcttcacagcaaccacggatgccccagcatcacaaagacatgatgtcagcaaaggaaatgtagagagaccgaatgtgaaatctgtgagccactggagctggtgtttcacatggtgtcagaggtggaatgctgctgtgcttcccctaattttaacatatccagggtccctctgtggacagctgaagctgtgaggatagaacagcaggaatgccgtaggaattagttggagggggcaggtaatggaagagctgatctggttgctaagcagctcagaatctctggagatgaatcataatggaattagagtaagagcagacagtgcagaaggggctactctgctccagccaaatgcagctgcagagaataagaaaagtgatgtggatgttccacagtctccccttttctttcctctcccctctcctcccctctcctcccctgccttcccttcccttcccctcctctcccctctcctcccctctcctcccctgccttcccttcccttcccttcctctcccctctcctcccctctcctcccctgccttcccttcccttcccttccctcccctcccctcccctccccttcccttcccttccttcttcctttcccttttcttttattttctttctttctattttttttttgagacagagtcttgctctgttgaccagtgcagtggcacaatcttagctcactgcgacctccgcctccaggctcaagtgattcttctgcctcagtctcctgagtagctgggactacaggcacccgccaccatgcccggctaatttttgtatttttagtagagacggggttttgccatattggccaggctggtctcaaactcctgacctcaaatgatccgcctgccttggcctcccaaagtgctgggataacaggcatgagccaccgcatccagccccaagtttcttaataagttctcatttgtttattctgatggtcttcatttgtaattgtatgtccattgcctgtatgtatatttggccagcaatcccctaatgcagttcaggatctgtgggaaaaatcaagacatttccagggggtccacaatttctagactatttttttaaagaacattaatattttatttgcttattttcttctctttttctctgcatgatgtgatattataatatttgaagtaagaagcagattggagaatccatttctcttccattaaggaggaaattaaaggagtttgcaaaaacttctaacaatatcacctttattactaagtttttgtttggaaaatataattattgttcacaaaatgtgagctatgttaatatacaatagatttgttgttgtcgttaagcttaaaaagtaacgtttgactatttataacatgatctatatgagatcatgttatgttttatttatatcttataccaagaaacatcctttgggagtttcccaataattttaagagggtaaaatagtttgagatgacaaactttgagaattactgtcctgggttaaattccttggttccgttttgctggattgaaagacacacacacttaatgtttctgagacatgatgccacattgctatgatgttccacagctgtttctctggctctattttctcacgggaaatgtaacccaggtctgtcggactcttaccaattttccagtctgcctcctctcataaattcagtgaaggaatttctttctctttctctttctttctttctttctttctttctttctttctttctttctttctttccttctttctttccttctttctttctttctttctttctttctttctttctttctttctttccttctttctttctgcctttctgcctttctttctttttctttcttttttctttctttctctttttccttccttccttccttccttctttctttccttctttgtttctttttctttttttttttcgtctttttcagaatctcgctctgtcgcccaggctggagtgcagtggcatgatctcggctcactgcaagctccgcctcccgggttcatgccattctcctgcctcagcctcccgagtagctgggactacaggcgcctaccaccacgtctggctaatttttgtatttttagtagagacggggtttcaccgtgttagccagggtggtctcaacctcctgacttcgtgatctgcgcgcctcagcttcccaaggtgctgggattacaggcatgagcctcgtgcctggcccagtgaaggaatttctatgggaagcgcacgtggcctccagttacatggatgttcagagatctcccctcatgtggggtatgattagatatctcagaagataatgttcaaggtatagtcttcagtttataaaccccagtcccgacatggggtgtcgtgggtgatcgtgggccagacatgtgccccttctgaacctcatttcctttacctgtaagtggaggatgggctgggtaaaaactcaacaaaatggccaacacattataggcatttaatacgttataactaggtttttctgaatttttacactaaataggaataagagttttaataattatgagcaaaagaggatgagaacaaacacagagtcggtgtctgtaaaatttctctcaataggccaggtgcggtggctcacacctgtaatcccagcgacttgggaggctgaggcaggagaatcactggaactcgagagaaggaggctgcagtgagccgaggtcatgccactgcactccagcctgggtaacagagagagattccgtctcaaagaaagaaaaaaaaaaaaggaatggatatagaagaaaaggaaaaaagaaaaaatatagaaggaaaagaacatagggaaactcataatttgggataataagcataataaagtcaaactcaggcagaagaatgtgattctaggagacagagagaggcaaattatttggcatgaggcctctgtgtttcccttaaatgagccgccccaggccctttgcacgtgttgctcctgccatcactgggtcttcatgtggtgccttcctgtctccattcaggactctgaccagaggtcacctctcagggatgccttctttgattcctgtccccagaagcttgtcatgcacctctaccttccaaccaccatggggttgattttttttatttcttccatatgtataaaaaaacaggatacatgtgcagaatgtgccagtttgttacataggtatccatgtgccatggtggtttgctgcacctattgacctgtcctctaaactccctcccctcaccgcctacccaccaacaggctctggtgtgtgttgttcccctctctgtgtccatgtgtgctcattgctgaactcccacttatgagtgagaatatgtggtgtttggttttctgttcctgtgttagtttgctgaggatgatggcttccagcttcatccatgtccctgcaaaggacatgatttcattcctttttttggctgcacagtagtccatgatgtatatgtaccacattttctttatctagtctatcattgatgggcatttgggttggttccatgcctttgctattgtaaatagtgctgtgataaacatacgtgtgcatgtgtctttatagcagaatgatttatattcctttgggtacatacccagtaatgggattgctgggtcaaatggtatttctggttctagatccttgaggaatcaccataccgaatcaccataccatcttccacaatggttgaactaatttacattcccaccaacagtgtaaaagcattcccatttctccacagcctcaccagcatctattgtttcctgactttttaataattgccattcatacagaatcaaagaagacttcgtatagccaagacaatcctaagcaaaaagaataaagctggaggcatcacgccacccgacttcaaactatactacaaggctacagtaaccaaagcagcatggtactggtaccaagacagatatatagaccaatggagcagaacagagacctcacaaataacactacacatctacaaccatctgatcttcgacaaacctaccaaaaacaagcaatggggaaaggacctcctattcagtaaatggtacttggaaaactggctagccatatgcagaaaactgaaactggatcccttccttacactttgtacaaaaattaattcaaggtggattaaagacttaattgtgaaactgaaaaccataaaaaccgtagaagaaaacctaggcaataccattcaggacataggcatggacaaagacttcatgacaaaaatgccaaaagcaatggcaacaaaggccaaaattgacaaatgggatctaattaaactaaagagcttctgcacagcaaaagaaactatcgtcagagtgaacaggcgacccacagaatgggaggaaatttttgcaagccaaagaaactatcatcagagtgaacaggcgacccacagaatgggaggaaatttttgcaagcaaaagaaaccatcgtcagagtgaacaggcgacccacagaatgggaggaaatttttgcaagcaaaagaaaccatcgtcagagtgaacaggcgacccacagaatgggaggaaatttttgcaagcaaaagaaaccatcgtcagagtgaacaggcgacccacagaatgggaggaaatttttgcaagcaaaagaaaccatcgtcagagtgaacaggcgacccacagaatgggagaaaatttttgcaagcaaaagaaactaccgtcagagtgaacaggcgacccacagaatgggaggaaatttttgcaagcaaaagaaactatcgtcagagtgaacaggcgacccacagaatgggaggaaatttttgcaagcaaaagaaactatcgtcagagtgaacaggcgacccacagaatgggagaaaatttttgcaagcaaaagaaactatcgtcagagtgaacaggcgacccacagaatgggaggaaatttttgcaagccaaagaaactatcatcagagtgaacaggcgacccacagaatgggaggaaatttttgcaagccaaagaaactatcgtcagagtgaacaggcgacccacagaatgggaggaaatttttgcaagccaaagaaactatcgtcagagtgaacaggcgacccacagaatgggaggaaatttttgcaagcaaaagaaaccatcgtcagagtgaacaggcgacccacagaatgggaggaaatttttgcaagccaaagaaaccatcgtcagagtgaacaggcgacccacagaatgggaggaaatttttgcaagccaaagaaaccatcgtcagagtgaacaggcgacccacagaatgggaggaaatttttgcaagccaaagaaactatcatcagagtgaacaggcgacccacagaatgggaggaaattttttgcaatctacccatctgacaaaggtctgatatctagaatttacaaggaacttaagcaaatttacaagaaaaaaaacaaacaaccccatcaaaaattgggcaaaggatatgaacagacacttctcaaaagaagacatgtacgcggccaacaaacatatgaaaaaaagctcaatatcactgatcatcagagaaatgcaaatcaaaaccacaatgagataccatctcacgccagtcagagaggctgacttttttggtttacttcctgttttgtaagatattgatcaataggatgctgtctgctacccagctgatgccttatattctccctctagtggaatataagctcctttgaggatggtagaaataatgaacccctggtttgcattactgattgtgccagaagattgctactgtgaatgaaaagctccgaaggacaaaaatagatccatacctgatttcctgctcattatcatgaaaaatattcatttctcaatgctgcttataccaaggaaataggaataaagtaacaatgcacacaaaagagttggaggtttgagtatagaaaagcagtcatgcagtagtactggacacaaagtgaatggagaagctggtcctatttccaggcagtgctcagtgtccttagggatgagtcaccacgaggttagagtgagaataggcagtggggcaggggctgttcctccccagccacgtgtacctgcaggagtgaggatgaggaatgacatggagggagtcatggctcatcagggttgagggtttccaagagaatcacatgaagcagagtatgaaaaggagatttgagtttgtgcagaagaaactggttctaacaattgaccatagacagtgatctgaaggtgggatgaagattagcgggaaatgggtgaatcaatactatgtttttcctaaagaaaaggaaaattggcatcaggtgagcagaagtcacctggaagataggcagtgatgttgcagatgggaggcttgagctgaggagatgggctgacagcctctattggtaacaacaaggctgatggcaatcgatggctaaaggagtttagataggaaatttgggagagaggagatcaattttcagatagtgaagtgttgggagggtcagctatgttagtgttcctccacatcagcactattgaaaatttgggcttgaaagttctttttttgcagggtggggaagcctgtcctgtttttgtaagatattgatcaataggatgctgtctgctacacagctgatgcctacagccctcctccagttgtgacagccaaacatgtttccaaaaattggcagatgtctcctcatggcaaaatcttccctggtggagaaccacagatattaacgtgtaggatattccccaggattatagaggaaagtgatgttggtgaggacaacagtccacatccacagagaattgagatcacacagaaatcggggcttttcatgaggctatgtgtcccaaccttgcatgttattttctgtaattctgatgggccacatcttggatcttgctgaccctggagggatgatcctgctgggtcttgtcaattcctgaagatagtaaacagctcccttgaaaggcagcctttcatgtggaaaccaatccagatcccactccccaatcatctcctctatggagcattcacactgacagccacgaatcactcagctctcctaatcaccccaggaccaggcatcagacagctcggggacaacccctatgcccagagccactgaaattcttcagagaagccaatcttgtttacctgctcatttacccccacttgttctttcccttggaaaccataattaaggctcttcactcacaagtccttccatccccttcctcttgccagatacttgtccttcctgtgtgactacctggtgtggtgtgcccctcctcttgggaatgtgagcaaacagctatatttgcagtaacaacttgtccctcagtctgttttaccgttgtgtgtgaaacttggtaatttctggtcttgattcatgcaattatgagcctcattttgtgggagtccctcgagtaccctgatgcatttccccatcgtgtgtgtgtgtgtgcgagcacgcacgtgtgtgtagttgaaggggagtttgggagacacggcattctcaagcaaattggagatgcagaccactttccctgcctcttatctatattattagaatcttgcccaaccctaaatgtccagtcccaaagatggagcaagacaggggccctggactccctcttctgggaggggccagggcacttttctttggatgctcagacgtgggatgggagcaggtgatggaggcgtgggctcagggccagagagcttggagacttccctctctgagcccagtattttccgccataaaatgcaggcacttgtaggtctcactcacaaccagggctgtggggatggccatgcgtatgttcctcagcattgaggcttctgtccaagaagctgaggggaggtgaaatctagcctgcactctttccaagttgtgcttagttcgaggataaataatcccaccagcgccactccctcattgatctctgcaaagccccttagcccaccaccgtggccttgggttcactcatgaaatttgagaaacaaattagttcaaggaacaagagagcaaataaatagtgacacagccattttcaggatctcatttttttcctgtttcttctcacatgaggcaatggtaatgctactgtaaagtgcctttgccatcactaggtggcactcttgaagcaatagaaagtatacagacgtttaacactttttatcttttcatttttaattgtggcaaaatacacagaacataaactttaccgtataatccattttttactaatattaattgaaaaacaaaggctggcaagtttaatttttttttttgagaccaagtctcgctttgttgcccaggctggagtgcagtggcgtgatctcggctcactgcaagctccacctcccgggttcaagtgattctcctgcctcagcctcctgagtagctgagattacaggcctgcactatcacacccggctaatttttgtatttttagtagagacggggttttaccatgttgaccaggctggtctcaaactgttgacctcaggtgatcacctgcctcagcctcccgaggtgctgaaattacagacgtgatccaccgcgcccatcctctaattttttttttttttttttttttttgagacggagtctcgctctgtcgctcaggctggagtgcagtggcaggatctcggctcactacaagctccgcctcccgagttcaccccattctcctgcctcagcctccacagtaccacagtagctgggactacaggcgcccaccatcatgcccggctaattttttgtgtttttagtagagacggggtttcaccgtgttagtcaggatggtctcgatctcctgacctcgtgatctgcccgcctccgcctcccaaagtgctgggattacaggcctgagccaccacgcccgacctaaaaatttttttaattgtaaaaaatgatgtaggccaggcacagtggctcacgcttgtaatcccagcactttgggaggctgaggtaggagcatcgtgtgagcccaggaattcgagaccaacctgggcaacaaggcaaaaccctgtcgctacaaaaaataaaaataaattagctgggcatggtggtgcaggcctgtaatcccagctactcaggaggctgaggtgggaggatggcctgaggtctgctgtgagctgtgatcgtgctgctgcactccaacctgggtgacagagcaagatcttttctttaaaaatggtgtaaattattacatagtttaacgttgatattttcatcatcttttaagtgtgcagtttgttggcttccattacattcgggttatttgcaaacatcactaccttccacgcccagaacagtcttcatcttgcaaaactggaattctgagctgattgtacatgagctctgcatttctcctctctaagcccccatgagccaccattctactttctgggtctatgaattaggctagtctggggcctgacctaagtggaatcatgcaacagtgtccctctggggctgacttattccactcggcatcatgtcctcagggttcctccgtgttgtagcatctgtctgggtttcctttctttgtaagactcagtaatattccattgtatgtgaacactacagcttgtttaccaatatccactcatcctttgatggacacttgcggttttccacctttgactattatgaataatgcatcgtgtcacatttccatcaacaaggcagaagtttcctacttttccaaagcctgccagcacttgttattttcaggctgggcgtggtggctcatgcctgtaatcccagaactttgggaggctgaggtgggcagataacctgaggtcaggagttcgagagcagcctggccaacatggtgaaaacatgtctctactaaaaatacaaaaattagccagaaatctcttgaaccctggaggtggaggttgcagtgagccgagatcatgccactgcactccagcctgggcaacagagtgagactccgtctccaaacaaacaaacaaaaaaccacttgttattttctgttttatggatcatagcaatgttaataaatgtgtggtggtttcttctttctcttaaaaataatttttcttttcaaacaaaaactattttatttagaaaagccatgttgaatcatggcccagcttggaaagttatttatttattaaaattaattaatttttattaaaacttttttaaaatgtagatacaggcttgttacaaggacatcttgcctgatgtggagtttggcttctaatggccccgtggcccgcgtagtgaacgtggcgtgagacaggcggtaccttcccttctgctgttgacagtgtctactgttctcatatccttgtgcctgtgtacccaatgacaggcggtaccttcccttccggtgttgacagtgtctactgttctcatatccgtgtgcctgtgtacccaatgtttaactcccacttataatggagaatgcatggtaaaaatcattctttattcttcaatcatggcaagtccttcatcatgggacgcacgtgcctgttggggactgcaaacctcttatcccttggcatcagcctggactgcaccactctcatttccttatctatgttaatttttgggtggtgattgcttctcttcacagcagccactgacacccccgcatcacagagatgtgatgtcagcaaaggaaatgttgaaactgtgaacccctggagctggcaggttctgtggtgtcagatttcgaatacagctgtatccgatgccttcaatgttaaggtacctaggatctctctgcagagatcgtcacagcggtgaggatagaacagcaggaatgcagtcggtgttcactgcaggggagagagtggaggagctggcctgattggcaggcaatgctcagtgtccttgttggagagagtcaccatggaaacagagtggaaacaggcagtgggggaggggctgttcctccccagccaaatgcagctgcagagaagaaggaaagtgatgtggggccggtgcagtggctcaggcctgtaatcccagcactttgggaggctgaggcaggtggatcacttgaagtcaagagttcgagaccagcctggccaacatggtgaaaccccgtctctactaaaagtacaaaattatacaaaatacaaaaatacaaaaaatacaaaaattagctgggcatggtgatgcacacctgtaatcccagctacttggaggctgaggcaggagaatcacttgaacccgagaggtggaggttgcagtgagccaagatagtgccattgcactccagcctgggtaattcaaagtgaaactccatctcaaaaaaaaaaaaaaaaaagagaaagaaagaaaaaaaggaaagtgatgtgaatgtcctgtagtttctttcatggataacctctcatttgtatgttcagatgatcttataatttcatatccactatttgaatatatcttacatcaatgttgtcccaaaaggtagttcaaggaccttgtgaaaatcaagaccatttgaaagagttcacaagttctatatgttcttaagaacactgttttatttgcctttttccttcccattttctcttcacgatgtaatattgtatgtttgaattaattagctgaaatgagaattcggctgctttgtattaagaaaagatttctttttgtagagacaaagtcttgcctttgtcgcccaggctagagtacagtggtgcaatcatagctcactgaaacttcaaactccttggctcaaggaattctcccaccatagcttccagagtagctaggactacaggcacatgccattcaactggactaattaaaaaaaaattttttttttttgtagagggggagtctcactatgatgaccacgctggtcttgaactcctggcctcaagcagtccttctgccttggcctcccagcatgctttgatgacaggcatgaaccatagcacctggttattaagaagagtattggctgggaggagtggctcatgcctgtaatcccagcactttggaaggccaaggcgggtggatcacaaggtcaagagatcaagaccatcctggccaacatggtgaaactccgtctctactaaaattacaaaaattagctggatgtggtcacgcacacctgtaatcccagctacttgggaggctgaggcaggaaaattgcttgaacctgggaggcggaggttgcagtgagccaagatcacgccactgccctccagcctgggtaacagagtgagactctgtctcaaaaaaaaaaaaaaaaaaaaaaaaagaagagtattaaagggatttataaaaaagtgaaacagtgctccctttataactaattttttgtttggaaaaagtaattattgttgataaaatgtgggttctgttaatatgtgatagggttgttacttttttatgttttaaatttaaaaatttctcagcttcaatttataatatggtaaatactcctagatataaaccatgcaaagaaaaattctttagagattctcaattatcttgacaagtatacgggccttctgacttttaaaagtttgagaaatactattttaggctaaatttctaggtataattttgtggggttgaagaagacacatgcttaatgtgtctgatccacgatgccctatactttcagagtaagtgaaagaaagtatagagctgttttctggctctgaaagtatagagctgttttctggctctaaattctcatgggagtgtgatttatatgtgtcaggcttattgatttgccaagccgcctaccattataaacccagtggggagatttctccaggaagtatgctctgactcctattacccaggctttcagagatctctcatataagtttagaattcccagaagagaaggtagaatgtatattctcaagtttataaatcccaggctaacattcattactgggtgatcatgggccagacacctgcctcttttgagcctcgctgcctttgcctgtaaatgaggattgggggtgtataaggatttggcacaatgcccaatacattgtacaaattcaataaataatagttgtacattttgcatttctaccataaataagaaatacagtagtaatttaatgatgtgagcaaatgatagttagaaagaatagagaggcattttctttgtgaaagtttctccaacgactgtatccacaatggttaaagctcttctctccccaattctggtatgataggtgtgccacttctcctgttccttgtctctcttggtgatataactgtttacccatttccttcactgggccatgaactcttagtgttcgggtcgtgtctctaaaacctgtatcaatagcactttgaacttaaaaagcaggtaaatagtttcctggcttagcccttgatttaagaatcaggacagaggccaggcgcggtggctcacggctataatatcggcactttgagaggccgaggcaagcggatcacgaggtcaagagatggagactagcctggccaacatggtgaaaccccgtctctactaaaaataacaaataccgggcatggtggcacacacctgcaatcccagctactcgggaggctgaggcaggagaatcacttgaacccgggaggcggaggttgcagtgagccaagatcgtgccactgcactccagccttgatgacagagtgagactccatctcaaaaaaaaaaaaaaaaaaaaaaagaaaaagaaaaaagaaaagaaagaatcagaacagtaccatcaatgactaaaagctatccttggggctgaaggacaatgagactatggactcattgataagggaagtagttgatgctaaccaacttattcaaaggtgacctcaaagtatatttgtgggataaattgaaaatttattattttacaaataagaagacagggccccaattgggtcttctgcctacagctccacataaagactggttatgtgtttatttcattattcaacagtcaccagcacatgccatgtgttaggcacagtgctagggacagagggaagagtagtgcatatatgataccagcattcaaattcttcacagtctgtgggttcactgaaggtcctacgtaaccattccaatgtttgtattcttgtttctctaataatctagagcaatacccgtacatgaaatatgttgactggttaataagtaggctttctggagaacctgaaaaaaaaaatcaaactatagtccggcgtggtggctcatgcctgtaatcccagcactttgagaggtcaggagttcaagaccaacctggccaacacagtgaaaccccatctctactaaaaatacaaaaataaaataaaatacaccaggcatagtggcacaggcttgtagtccaagctactcaggaggctgaggcaggaggatctcttgaatccagggggcggaggtcacggtaagccaagatgacacgactgcactccagcctgggtgatagggtgagactccatcttaaaaaaaaaaaatcaaactgtattgaaggatgagtaagaagaaagaggaaaggggaaaatgaaggagaaagggggaaaatgaaagagaaagagagaaaataggtagtttgcgatatggaaggatgaagagaaagcagagagggaagagagagcattcagaccaaaggagattctaagggagaaatagaggcaaaatgtttagctccagccacatggttatatcttataccctggaattaatcagcctcaggaccttttcatgtgcagctctttccatcaccctaggtcttaatgttgcctttctctgactccagttaaggttctgataaaagttaaccacccaagaaagccccccctatatttctatttccttaatagaaagcagccgaattctcatttcagctaattaattcaaacatacaatattacatctatttccttctttctttctttccttcctttcttcattccttccttccttcctttctttctttctttctctctctctctttctttctttctcttttttttttcggagtcttgctctgtcaccaggctggagtgcagtggtgcaatctcagctcactgcaacctccacctcctgggttcaagtgattctcctgcctcagcctcctgagtagctgggattacaggcgcgcaccaccacgcccggctaacttttttttgtattttagtagagacagggtttcaccatgttggccaggctggtctcgaactcctgaccttgtgatccacccgcctcagcctcccaaagtgctgggattacagacgtgagccaccgcgcccggctgcagatgcttcttttatttgcttgcttttcactgctttcgatccactggaatgtaaactccatggataatgtttgaaaatgaacctagcgttgtgagtttctgctagtttcaggtttgttactgggaatagaataagtccaatgagcaacaatagtaactatatctcattttcttttgagacatcatgaaaatattcactctgtgatgctacttgtatttgggaaatataaatcaagtgaaaatggggatgacaggcttggaagtttaaggatagaaaagctggcatgcagcaagcattcatcggagggggattgaatggagaaagtggtcttgtgttcaggacgccctcggccttcttgacagcgagtctccatgaaagcagagtgagaacaggcggtggccgagggtctgttgctcctcagctatgtccagctgcatgagtgaaggacagagcaggcagattcatagtccagcaagcatttatttttctaagagactaacaaaaagtagaatatgaaaaattgcttcatatgtgtgcataaaaattttgttttaaacagagatcatagaaggtgaccttgaggtgaaagttaagatcaatgaaaaatgggcaagtcaatggagcattggtccctaatgaatgaagtgatgttggcatcttgtgacaagttacctgaaatgtaggaagtaatgttggagatggggtgctttaggtaaatggatggaggggtttgggttattggtaatgagaaggctaatgggaatggattgctaagaggcattggacagaagcactgaagaagaggaagtcaatatattgatagtcaagaggttgggagaaccatccatattaggtattatctaccttagcaacgtagaaaatttgagctggataattctttatgtcaggggggttctgttctgacattatagaatgaggaacagcatccctgactactatccaccaaaaagctcactcgtcataatcaattgggttattccagggatgcaaggatgtttcatcatatgtaagtcaataaatgtgatacatcatatcaatagaatgaaggacaaaaatcatataataatttcagcagacacaaaaaaagcatttcacaaaatttaatatcctttcagagtaaaaattctcagcaaactaggtgtggacagaatgtactcaatataataaagaccatatatggcaaacccacagctaatgtcatgcttaatgagaaaatgttgaaagccttttctctaagatctgggacaagaacaagtatgcctattcccaccacttctattgagtatagtactgcacattctatccagagtaattaggcaagagaaagaaatgaaggcatccaagttggaaagaaagaagttaaattgtacctgtttagagtgacttgaccttacatatagaaaatcttaaaggttccattaaaaagtgttataactaataaacaaattcagtaaagttgtaagatacaaaatcaacatgtaaaaagtagtagcatctcgatacactaatggcaaaatatctgaaaaggaaattaagaaagcagtttcatttacaataagcttcaataaaataaaattcttaggaatgaattaaacctagatggtgaaagatcactacactgaaaactatacaaccctgaggaaagaaattgaagaagatacaagtaaatggaaaaatatcttgtgtttatagatcagaataatgaatatagtgttaaaatgtccatactacgcaaagtggttcaatgcaacctctctaaaatcacaaatggcattcttcatagaaatagaaaacaatcctgaaattcatatgaaaccataaaagacccagagtagccaaagcaatcttaagcaaaaagaataaagctggaggtcttacactacctgacttcaaaatataccacaaagctataggaactaaaacagggtgattctgtcataaaaacacacacatagaccactgtaacagaataaaaatcccagaaataaatccacacattcacagccaactgttttttacttttgacaaagataccaagaacacataataaggaaaggacaatctcttcaacatattgtgttgggaaaactggatatctatatgcaaaggaatgaagttagacccttatctcaccttacatacaaacatcaactcaaaatgaattaaagacatagagggaagcctcaaaactataaaactaatagacgaatacataagggaatatccccatgaaatataaaggaaaagtcattcacctgggcaatgactttttggatataacctcaaaagtactggcaagaaaagcaaaaatagccaaatgggattgcatcaaactaaaatgatactgcacagcaacgaaaacaatcaacagagtgaagagacactgcacaatgagagaaaatatttgcaaactatatatatctgatgaggggccaactcacactcacactcctcatccacgctgatttcaggtggtgatcttttctcttcacagcaaccactgccaatccagtatcacaaaggtaggatgttagcaaaagtaatgtagagagagctaatgttgagtctgtgaattgctggagctggtagttcatggtgtgtcagatgtggaacattgctgttcttcccttaagtttaaagcatggggataccccagcagacagttgcagctgtgaggacagaaaagcaggaatgcagtaggttttcactgcagtcggagagaatgaaggagcgggtcctgtttccaggcagctgtcagcatccttggagatgagttgccatgagataagagtgaaaacaggcagtgggagaggagctttttctccccagccacgtgcagccacaggagtgaggggcagagcagaaaagggtcagagtccagcagcgatgggatattccacaagaattgcatgaagaatataaaaaagagatttgcatgtgtgcagaaggaattgattctgaggattagccatggaaggtggccgggtgtaaaggtgaatctcagtgtaaaatggtagaattcctggagcgctggtcaccaaggaacggggggacattggtgtcaggtggggaaggggtcgcctggaagtcagggagctgatgtaggagatgggatgctgatctgatgggataaagtgattttggttattggtaatgagaagttcaatgggagtggaaggctgagggaggattggagaagaggtcaatatatggatcgtcgagagggtttggaggatcattataatgggttttccaccttggtggtgtggaatatttggattggataacgtgtcgtgtggggacagggacttcctgtgcattggaggatgttgaactgtattcctggcttcacaggaccctttcagaggtgaaaattaaaaatgtctctagatattgacaagtgtccccagtgggcaaaatcaccctggcttggaactactgatctaagtgggttataatagtcaaccacagtgtggatcgaagtattttggggtcgtcactccacatccacagagaactcagaacaacaggaagtggggagttccctgaggatgcgggcaccaaaccatctttaacttcctgtattctgatgctttgacatctgggactggctgaccctggagacatttcccctctcagctgtcttcaaccgctggagatagtcacaactttcctgcaagtgtgcctttcatgggtaaaccaaccagtcctagcttacacccccagccacaccttatggagctctgagccacaatccacgtgcacagtcacccaaggtcaggtatcagaaacaacgaaggacgtcccataacccacagctactaaaatgacctaaatgagcctgtcgtcagcctgcttatcctgcatgacctgtttcttccaaagggaacttcagtggctttgtccacatttcctcctgcatctctctgggtttttgctgaccaggtgattccccgtgtagctcccctggctgtgctgtgccctcgacttgtgattatgagcaacaaactttccttttaatggcaggtatctcctgatctgtttaactcctgtgtgtgaaactttgtgattcatgcaatgagaacaaggctttacgtgaacagaccagagcccaggtgcagggcggtcattccagagcccaggtgcagcaggtgcagggcggtcattctgcccacacaggtatgtgttgggggagggcaagttgaaacagagcctgagagatgaattcattaatgaacaaatttgagccccaagccacatttcctcctttacagccaccttggtaggaccctacccaagccccaaatgccaagccagaatgcagagcaagacagcagccctcaaatcccccctctgggaggtgccaggactcccctccttggatgctcagagacaggatgggagcaggtgacggaggcgtgggttcagggccaggcagcctggagacctcccctccctgcgcccagtgccctgctctgtaaaatgcagacactcctaagacctcacgcacagccagggccgctggggatggccgtgcgtattctaccccgcacttaggctcctgtctgaggagatgagaggatgtgaaatgcagcctgcactctctccacagctgtgtccatgccagggctcaagatcccacacctcagcctagcattgctctgtccaaaggcagacagcctggtacagccatgtgtgcagttattttcacttcaaaaaaaaccttattaaacaaaaaccaaatatatgtaaacacaccagttttttaagtatctcatttttttttctaatttgaggcaatgcctattgtcaagtatctttgctgtcattagacggaactcttgaagaatggaaaagtaaataggtattctttcttaatatttagttgtagcaagatacacataatacaaaatttgcagccacacacggtggctcatgcctgtaatcccagcactttgcgaggccgaagtgggaggatcacctgaagtcaggagttcaagagcagcctggccaacatggtgaaacttcatctctactgaaaatagaaaaaaattagccaggctaatttgattcatgtctggctcccccactcaactgacagcaggccccaggacagccagtggctgtgtcatcatgatctgctttgccctcactgtcctctcttacatccgcatcttggccacagtggttcagatccgttcagcagccagccgccggaaggccttctccacctgttcttcccacctgggcatggtgctcctgttctatggcaccggcagctccacctacatgcgacccaccacccgctactccccgctggaagggcgcttggctgctgtcttctactccatcctcatacccaccctgaatccgctcatctacagcctgaggaaccaggacatgaagagagccctgtggaagctctatctccaggtgccatactagggtctgccatctggatgcgggagggacccaaaaatccaccttcccaagattttccttgtggtcgtggtggaagtgttagtgcctccagagacccccaggaacacacctattcgccaaagttgtcaacaaagttgaattgcaatgaatcatgcaggagaaccctgatggatgtctggataaaatggagacaaatccaatgtgcatttaatttaggcaaatagtattaaatgtacacaggggaggagagaaagaggaggagcaaataatttaaatagggtgggtgattccacccaagagctcactcaataaatttatgacctggactacgaatccaataggagactgtcctctcagcctgcctcggtttccatgcacttccccatgtggacatgttttatcctgctcaatgtggttctaatgtttagtggtacacattttttcatctagtgtttgtcctaaatgcaagccaaagccttcatcacaagcagcagcatctattccagaagaaaaataggccatattggacgtgcagagaaatggttggtagtcttcacgcggctgcttcctaagggaaagtcaagggtacctttatctttctgcaatgtttctctgatagcaaaccctgtatttgttgtatttctggttcagctgctttaacagaaacaaaataacagcaacctaagtcatacagaaggcttgtttctcttttgtgtaatcatttgtgcttggaggtgaccctgggtgtctctatgccacagtcatcctgaggccaggttccttctatctcgttgctctaccatccctgaaggtttccttattcctatggtgggagttggatcactagcacctcattcacaatccagctgctggaagagggacagaggaaatggagggcaagctacatggttttaagatgtgacccagaagttatacgcttcacttctgctaacatcttattggctggtgtttagccacatggtcacactgaccgcaaaggaggctgggaaatgttgtctccagctgagagcccagataaaactcatgaaaggagagaatgttatttactaatttgtaatcagtccctcacatctgatctcttgatgagccaccatttatcttcttactcaatcctaccattatgcttccaatggccacctgtactaatgtttagtggcactaaaactttacatacattgtcacttttatgtacattatctctaatattcaaaacacctctgtgaggtagttgtaattttcctcattttttagataagcaaaataaaattctgataagttaggcagtttacccggagttaagaaggttgagaaaggcttgatatttttagattgatatttttaggtttgatatttcagaatcactcaggattctttttttttttttttgagatagggtcttgctctattgcccagacatgagtacagtggcatgatcatagctcactgtagcctcaacctcctgggctcaagtgatcctccaacctcagcctcccaaatagctgggactacaggcatgcaccaccacaccctgctaacatttaattttttttttttttttttttttttgtagagatgggagtctcattatgttgcctaggctggtcttgaactcctgggctcaagcgatcctcccacctaggccttccaaagcgctgggattacaggcatgagctaccatgcccagcctctacttcttttaatgatagagattgaattatatgtgtctagggctttaaaaaatcttaccttacagaggcatttctcagaagttttaggagtccgttgcagtcctaccaacatatccctgaggattgaacaattctgctctacctgggaccaccctttgatcaaagacataacccttaggggagacataaattggccaaagagagagaaaatgggtaggtgaccagccagcttgatcaagtctctggtgactactggggcatggcagatgcacacaaaggtgaccaccaattagtcactttcttgtataaacccttccccttgagtgtggtaggaacctgggatttgccttcagccaatagaatatggcaaaggtaagggttggtcacttccacagttatctgagagctcctctctgaggtgaaaaacacctcattctgttttactatctccattacatttaccacccttatgaaattatataaattattgagtgtgtttgttctaccccaaccaccccattcctctgaatataatatccatgaaggcacggtcttgttttcttcaatgccgtatcccctgtgcatagcgtagtacctgacacatattaggtgttaaatatgtatttttatgaagaaataaatgtgaagcagaacaacaaaaaacaaaaaccagagctgttcttgtgtaaacgagggtgagagggctgggatccttgtctatttggtgttttcccaacccctcagcacagtcatttctgcaacacctacatgggatctttgagctccacaaacctggttgagacacctcttctctaatcagattaatacatgctattgaatagaaaccaccattgattgtaagatactccactatcttgcattccattaagaaagaaaaagacactgccaatcaaattgtgacactccatcaataaaacatcttgattttccatgctaaaatgtgctcctcagccttcagatcacagctgaaatgtcacttcctgatcacccctgctggccaacctgtgtcatttctccttctatactctcagcgaacacacactgcaattttaattaattatgtaattatttgtttaaaatgtcttctgaagcaaaaatgaaaacagaatgaaggttagaattatgtctgcttgcatactattatccagtggtatgttgataaacttgctctctcaaaaaaaattataaatagcatttgacagtttctatggtgtaaatattctcaccacagctgatgtcaagctatcaatagttcaacaacttatttccaacattcctgaatatttataattggctcttgtgagctgacatcagcttgctccagcacagttcacccaggaccaaacactgtatctgtacataataatggcttaataaatgattggttagtgaatgaataaatggttgtgagtcacactgaatgaatatgtagcaggtatttcaaagttaacagttcaaaatacagccctttatgtctccttcatacctgtggtttttccgttttcacctcagttagcagcactgacatctgctggtcactcagggcaaaaatctctaggcatattgatttctctctctccctcacctcttcccagcactcttctcattatatccatgagtcctgtcaattctatcctcaatgtgtattctattctattccaaacccatccctcacaccatccccatggccaccatgctaacccagcacatcatggcctggccacaacagcctcctgcctggattccctcccttcagtcttacctttcaaagctcatcctccctccaccttaactccccacaccctgcctatgcgaaagccacagggtgttgctgaaaagataagtcaggtcccatcatcctcccgctgcggccctccaggtcctccacgatcggaccccacccagctctgcagcctcctctatcacgctctctcctgcagcttttattcccagctatgctggccttagctcagttcttcaagcaaaccattcttctccctacctcggggctctgcacttgctcttccgtcagctgaaatacccttccccaaatctgagcatcaccgcctctgcatatctgagcttcattctagacgtcgtctctttggaaagacctctcctaaccacttctttaagtggcatcatcccctccccctctcgcacatccccccgttttattgctttctgagcccttatcactgttggaaatcaccgtgttgcataactttgcagagcctgagacaaggacttgggaagggtggtttatgcctgggaaaaggcaggccgggtgccgggatgtagtgcgcctgcacgccgtctccagactacaactcccagaatgcgcggcgccccgagcgtatttccgcttccggtggcgttttagcgggagatccgagcgtctcggctggtggaaggggcgaggagctttgcagttgtgtgcgagtgtgtacaggtgagtttgtccgtacgcgtgattaagtgtgtgcgtgtgatcaagtgtgggggcgagtgttgcgtgagcaaacctgtgagagggtgagagtccgtccgtgtaggtgagggagctagcaagagtgtgagcgagtgcgaatgtccctacaagtgtgggcgcgtgatgtgtttgaaggtgtgtttgttcgagagggtgtgtgttggggtcaacgagggtgcatgtgtgtgagtgaggaagcctgagtgtgtggtgtgtgcgcgagccagcaagctggaatggctctcgcgtgcttgtagatcatgagcgtgacttggtggctttctgtgatggtattgggtgtgtatggctttttgctgtccatgcatgattgtgttagcttgactcgtgttggtgttgtttatgtgggaatgtgagggatttagttcatgagattacgtgtgtgttgctctgcagtctcaagcttgctgggttagctgtttctgaataggatttgacccaagttcagcgtcagcttttcaaacagcctaaaaactctggccttgggcattgagaaatcagaaagtttttttttctctctgtccctctgactataacagttgtggaagaattagacaattctaagaaagaaagtttcctgaattagcattaggaaaactagacacaaaaatcccactttctgaaaaaatgagaaacttcctaattgtaactaaaatgatcagtaaacaagccacttgctggtttggaagaaaggaaacacacctatgtgttctctttctgccaacacttgaattctctggtccaactgttacgccgtctacgtgacttccattaagaacaagcagcacccttaaatgcatctcaagtgttgtatgtcgctaaaggccatgaccggttcttggttttccttatctccaagctaagcctcagtttctgcatgcacaaaattaggaagataatatccacccatctacaactcaatgcattgagtcacatgaaagttttgtagacaggaaaagttctgtggcactcggcctgatcaagtcagctttcctgggtgttgctgagttaactataaggattatatggaaggaccatccctagactaattctagacctggctcctaatgtgcaggtcagcagttctttccgtgactggcaagtctgaggtcatttgcaagttaaggaagataaatgtactgatatctgacttggtttgcgccagagatgattttttcaaaagatgtattaactgggttggatgcagtggctcacccctgtaataccaacactttgggaggctaaagcaggaggatcgcttgaccctggagttcaagaccagattgggcaacatatcaagaccctatctctacaaaaataaaaaataaataaaaaattagctgggcatggtggcacttgcctgtagtcctagctgcttgagaagatgaagtgtgaggattgcttgggcccaggagctggagggtgcagtgagatgtgatcacatcactgcactccagcctgggcaaccgagcaagaacctggctcttaaaacaaaaatttattaactggaaaattaggcttcttcaacagttatttcaaacttaagagccggatgcccccacataatattaaagctgattttcaaggatctcttttctcaatgtaagaatgagtcccaaaagtgagaaaagatctgtgaaggctgtggtggagcagtgaaaagcattgtaattttcttgactctttggtccaaacatacaggagggacttctttccagtaaacaggagtgaggaaaagacaaggaatttaaatatatctatgtatgatctgcaaaatacacgagctgtggcgtataagttagaaagatccagccatctttcatggtttgcagcagtagatggacacagctttgcagaattgcagaacttgggtgattgagatacctaaacctggagttttgaatcccagctttgtcattactagttgtgtggccttaaacaagtcacatcacctccctgtgccttagtgtctctgtatgtaagatggggtgttgttacccatctcacagtaatggtgtgagtgaccgatgtgaatctcccagcatccagaaaggccctccagtctaggaggggccctgagactatcaacagtagccagttaggacaaaccaaactgaaaatagcaattatcaagcctctattcactgacttcaatagcataaacagaggccaaaaagaaaaaagtgccagcttctctgttctttttcccacgtagcagcaccgggcgagggtcagatgaatctatacaggaggtagggctcatctccctgccagggaaccctgaacaaagggccccagatcagacttctcaagtcgggatgattttacctcccagataaaatgtcgaatgacatttttgcttgtcacaattggagaagcgggtgctcctggcatccactgaacagaggccagggatactactaaacaccctacaatgcactggatggtccacaggagttgcccaacaccaaatgtcaactgcaccagtggagaaatcagtcctggtgctgctcccacatctgatcctatcactctccctctcactcgcaacccttctactgtctcctccaccaacatacaaagctattttctgaccaaagagcttcgctcatgctgtttcctctgcccggacactctcttctccagggtcccaggctgacttctcatctgatggtctttgcttaaaggccatctcttcagagagccttttttggaccaacctgtcttaaattagccctcccacttccatggtaactctctaccctctttcctggttttatttttcttcatagcatttaccaccttattttgcttattgcctgtctcccccatattgcacattaaagtttgagaaatactggtttcaagaaaggattgaaaactgaggatcctacaggggccagcagagatgatcttgggtgactttatttttttattttattttattttattttttattttttttaattttatttatttatttttttttgagacggagtctcgctctgtcgcccaggcgggactgcggactgcagtggcgcaatctcggctcactgcaagctccgcttcccgggttcacgccattctcctgcctcagcctcccgagtagctgggactacaggcgcccgccaccgcgcccggctaattttttttgtatttttagtagagacggggtttcaccttgttagccaggatggtctcgatctgctgacctcatgatccacccgcctcggcctcccaaagtgctgggattacaggcgtgagccaccgcgcccggcctgggtgactttaataaagcagccaaatgtagttagtctggttctaaaatttcagaattccttggcaatgccgaagtgaccctattcttgagatgctggctttttagaagaaatataagaaaaactctatagaagaaaactcacaactgcaaaaacatgcagaaataactaaggaaaacttgtgacattttgataagaaaactataaagctttactgattgatacaaaagcttgaatgaatgaaaacacagtatcatattcctggatgttaagattaaatgtaacaatgttaatccttcctaacttataagttcattgcaataataatcagaaggttggtttttgattactaaagataaattttaatctggaataacggaaacttatatataacttcacataaatttatgcatacatgtacatatactttttaaaggcacaatgatggaaaacattaaatatagccataaaaattaagaagaatatagatctaggataaaacagggcaacaagccaataaaagcaagtagatggtccaaatatagaacctacattataaaatataacaatttataatttactaataatgttggggcaattaacaatgaggaagaataaatttaattctcttttcatacaatatgcccaagtaaattcaataatcactaaagcatatttttaaaactccagaataaaacactaatgtttacagagggttagattttgtagggttggaagaaaatagaaggattgaaatatataaaaattgaaacattttcaaaaaataaagaaaataccaaagagggaaaatcatttgcagccaagatgacaacaaagaattaatatctttattatgcaaagagatggttcaaactgataggaagctattaaagtcacatagacaaatgattaaaagacagacaatgtgaagagaggaaacaatggcttaagaagcttacaggagaaagttcaacatccttaaaaatcaaagacaattaaaatgagatgccctttcccctattagcaaagttgctactaaacaccctacaatgaaaagtgctgttattacataatgccagctgggcgggaggtgtggggggtagtgggtgtgtgtgaggaacacgtatccccaagcattactagcagtagcagcagtgcaaactgatgtaatgtttccaaaaggaacttggatatatcaaaaatcttaaaagcaattatacaccttctgatgcagcaattcctctttggcaaatatgtatcgtaaagaaattttacatttggaaaaaggtttaagcaccgaaatgttgattatagtatgttcataactatgaaaaattgaaactgaattttacctcctaacaacagaggaggagccatccacagaaagcactgggtttgctgtgccactggtaaggcggtgataaccacagacgagtgagtgatgacagcagttttgtaaggtataagattgggtagaaaaacaaggtatactatcgcacacatggaatagtcacagctatatgacaactatctataaataccttaaaaataggtaatacagggttgggtgcggtggctcacacctgtaatcctagcactttgggaggccaaggcaggcagatcacctgaggttaggagttccagaccagcctggccaacatggcaaaaccccatctctactaaaaatagaaaaaaaaaaaagccgggcagggtggtgcatgcctgtagtcccagctacttgggaggctgaggcaggagaactgcttgaacctggaaggcagaggctgcagtgagccacgatcgcgcccctgcactgcagcctgggcaacagagcgtaatacagtcatgagggtaacaaagtggacaggtatagaccatgaaaatgagatctttacttcagccactccccagaggcgactaccttcataaatctagtcattaattttaagttacaagaaaacagactaaaaatgttagtggtgttcatagtgtatttttctgtttcggggcagagggagggagagagatctacatttctgtaaagtagttgcctttaatgagtcaaatattgctttaaaaagaaaaataaacattaatccatcagaaatgtgtacttaaaaggaaactgagttcacacaaattagtaagaaaaagcataaagacaaaaaagctaaagaggtaaagggcctaggttatacataaagaagtttttaaaacttatttggaaaaaatgcataataataatgcaaaaatggattaattattgttaataataatctttttattaccaaataggtgaagatttttatctttttattaccaaaaagatttatctttttattaccaaataggtgaagatttttatttatctttttattaccaaaaagatttatctttttattaccaaataggtgaagattttttggttgttaagtgaataaatacccagtgcaggcaaagttatttaaagggagtatttatttggtaccagggtgacaaaggcagttctttgcacatacaaaaactgcttagtgtgtcttgtttgccttgggtgctgtgctgagaaagatccaaccctgtcctcaggttcactggaaccagagagtgcataactggttaacaacgcctgccagggactcgagagggaggattgtaagtttaccacctatttcatacctctggccctccctatgctgagggctacaaatggcagagcccctccacaaacaaatccagcaggatctttcgagagccttagaaatgttcatcacatgtcatctagtgaaaccactttttggaaatcgattctaaactgtaaatacagtaatttatgctttgttaatcagacttttatataaattaaaaattgtcacaaaatcagaaaagaactttaaacttgtaatattatttttaaaaacctacacatagaaaaaaatatttgtagaaaaaatactaaaatatgataaaatgtggttgcgttttgatgtgttaactatggtttacaactctagtttattgctgctaataaaacattttaaaaaataaattttaggccgggtgcagtggctcacgcctgtaatcccagcactttgggaggctgaggtgggcacatcacgaggtcaggagtttgagaccagcctgaccaacatgaggaaaccctgtctctactaaaaatacaaaaattagctgagtgtgatggcacgcacctataatcccagctactcaggaggctgaggcaggagaatcgcttgaacccgggaggcagaggttgcagtgagccgagatcataccactgcactccagcctgggtgacagagcgagactccatctcaaaaaaaaaaaataataataaaataaaatttaaaatactccctaattgcaactacttgttactgagtgccttctaaataccaggcactattaggctcttttctatagatgaactctagaccttttaatggttctcccaggggaggatccccatttcctaagaaaacgaggtataatcagcctctaaggaggaccttgaaatttgacctcagctctccctggctccaaagcccaccctctctcttctctgccaagggtctcttctacttgtgaatataactacctccctggacttgtactagttgcatacctagaactattaggaagtttattagccttctctgttttgcaaaattttctttaatatgctcaatattatttgtatagtgaggaaacaatacctaataaaactatgttaaaaatcatagttcaggccaggcacggtggctccacacctgcaatcccagcactttgggaggccaaggtggggcgggtcacaaggtcaggagatcaagaccatcctggctaacacagtgaaactccgtctctactaaaaaaaaaaaaaaaaaaaaaaaaaaaaaaaaaaaaaaaaaaaaaaaatttgccaggcatggtgacgggtgcctgtagtcccagctacttgggaggctgaggcaggagaatggcatgaacccggaaggcggagcttgcagtgagctgagatcgcgccactgcactccagcctgggtgacagagtgacactccatctgaaaaaaaaaaaaaaaaaaaaaaaaaaaaaagagaaattataagcaaccccagtttccaaccatgaaaggccagatgaaataaattaggacacatccatgcaaccaagtactaaaaggaaatttaggaatgtatttctgtatatggaaagatgttcataatatatgagaatgaaaatgacagccctcaaaacagtgtttatggtagtatatttcaattcataaaaatataactttttttttctgagatggagtctcattctgttgtccaggctggagtgcaatggtgcaatctcagctcagtgtaacctctgcctcccaggttcaagcgattcttgtgcttcagcctcccaggtagctgggactataggcgagcgccaccatgcccggctattttttcatatttttagtagagacaggatttcatcattttggccaggctggtctcaaactcctgacctcaggtgatctgcctgcctcggactcccaaagtgccaggattacaggcatgagccaccatacccagcctaaaaatataatttttaaaagctatacaggtttatgcataagaaaaaatgggcataaacttttagcagcaagtatatttgggagggggaaatacaaatattcaaagaaaaaacaaactttttctagttttcttcagggaatgtatattacttgcatcaccactaaaaaacttaaaacatgagtgtttctaaatttataggcgcgagccaccgtgcccggcctacaatgtgaatatacttaacattactgaactgtatgcttaaaaacggttaagacactaagctttatgtggtttttaccacaatgaaatataagaatttttaaatgagttcttctaaatttaaaaatgtaaacatgaagaggagtctctaaactgttagacatatcacgaactgggtaggaacaggagggaagttctatattaacctcagggttgcacaggccttaaaaacgtgagaggggattgctttagattaagagacttaagagattaaacaaccaaatgcaatctgtggaccacatttagatccagattgaaacaagccaactgtcaaaggacatcttggagataatcagggaagtctggttatcgtgtgagtaaaaccctttgtctgaggtgatttaaaaatttcctttttaagtagaggtactgaagtttaaaaaacataaatgagtccattaaaaatatgtcaagtaaataacagttcaagcagaatacagatttagcaaaaactgcaacgggagaagtgaaataaaagactgatcaggctatgagccttctgaccatgaggaaagaagcagatttcatgagagtgaatgaggtagaaactaccttaaagacatgatagggttttcctggaggtgaagggagaaaaattatggaagatatagaaaggaagtggttcctgaaaaggatgggagcttattgaaaaggcacaggagccgactgaaagagctcccaatggccaaagctgtagccatttgaacaacaaaataaatgacagtactgaattacagcctgtagaatacatatccacgaatccaatctgatataaaggagggcaatcctccctcacgatgagtatcactgaaaaaggcaaaatctattagctactttcctatgcaacaaaaatattctttgtaagcttttcacctgtgtgacgtgaggaatcccctcttcgaaaaattgcaactttttttttttttttaccacactttgatgaatgttcaagttgttaacaaggtggggctagtgaaaggccttctcacactcacaacactctaggaggaagccaataatgttgagaaaagtgtgtgctgtgactaaaggtttctcaacagtgatcgcactcaacagttttctcttgagaatggagttgataatgttgagtgaggtatgagggtcggccgaaacatttcccacatagctgacactggtaaggcctctcttgagtgtgagttctataatgctgaatgagatatgaattccgactgaagactctgccacagtcacaacactggcaggctctctctccaacgtagtcatgtttccgctgataacgaattaagtatgtcttgctgtgggacaacccaggaggaaggactcttgctgcctcatgggctttgagatgttgaagaagatgcacattctggagaaaagctttgccgcactgaaaacattcaaagtagtcctcctgactgtgaattcttacacgttcacagagattcgcacactggacggaaggctttctaccttcattgcagccagaagtcttcctaccagaatgggtcttctgatgtctgttgaggtgtggcatgagatagaaggcttcagcacactgtttacattcatagggtttcttcccagtatggatccgttcgtgtctcctaagggctacttgcgtactaaaggttcgtttgcaaaattcacatctgttgtgtttgttctcttgggatgctgactggggactcgtacatattccaggagcagtgccttcctggggatcctttcctagaggatcctttgattgtttactaagattagagcttctctcaaattcatcactgccatagcttctttccggagtgagggtcttggggtcattcattgttataggagtcaaaagtttctcttggttgccctggtgtggttccaatggatcatcatgagactctcctgcagagacaatgccagaagttacctaccgcccaattatccaatcctgccccccaataatgatatttctataggcaggctttgccctggagttagtgctttggtttcaggtctcttttcctaatctgaaaaaaaaaaagtaaaaattcctctattctttttactcagagagacataccaatataatagaaataaagagaccaaggataacaaacagatcttatggaggttgagagagttttctgaaaacctaaagagaaaatggaaaaaggatagaaaggacagtaagtggccgggcacagtggctcatacctgtaatcccagcaccttgggaggccgagatgggcggatcacaaggtcaagagattgagatcattctggccaacatggtgaaaccctgtctctactaaaaatacaaaaaattaactgggcatggtggcgcgtgcctgtagtcccaactactcaggaggatgaggcaggagaatcgcttgaacccgggaggtggaggttgcagtgagcagagatcgcaccactgcactgcagcctggatgacagagtgagactctgtctcaaaaaaaaaaaaaaaaaaaaaaggaaaagacagtaagcaaggaagagtgaggaagaaacagaaaaaatatcatctaggaggatggcgtgtcaaaaagatgccacaattgtacagagtagaatgagcagaaatcagagaaagagctggggttggggtttgtcagcattttccaaaccatgtttggcagatcgctaatattctgaaaaacaaatagctgttaccatgaagggggctccactgtcaagttaatttgggaaatgttgtatgacacaaatcaagcaggtttcattcctgtaggattcagaacttttaatatgcaccttgaaccctaaagagggaaggtacagaatgtggcatttcttaaagtgatcttgctatgaaacattttttttagaacatctattactatggttcttcaggactactgaggaaacactggagcaaacaggtcaacaacctcttgttcagaattaaacaaagattctcctttcttagctctgaatctcttgttttaccccaatctacactgtcaaccaatcctctttaattcaatatttattaaatgcctgttttgtgcaaggcattatctaaccagatgggtcagaggtctgtaaaagggactctaatcagactgtaagtgacgacaggagcagagatgggggaactgactccacttaggaacagaaaatgattagtggaggggacagcatttggcgtcagtaaacggggaaggggggcgagtttatataaaacagcctgagttaagctatagaactgtgaaaatatacagtcctggggagctagaaacacaggatcttagttgcaagatctgtagatgaggctgggatgcaaatttcaggccagaatgggaggaacttcagtgttttgctaaaagtttgaattttatcttgacggaggtaagaagctgataaaaagtctgtgctttataaaggcaactctctggttggaaaaatactgaagccaaggaagtcaagtataagactgtggtttggaagagaggtgatgaacacagtggttgcatcctggcagacacttgaagtatgtgaacagagtacaggtaaaacagcagagccagaacatggcttaggaagtcatcaggaaaagagggatagctgggcccatcacaatggattgactcttttaggaagtggtctttgaagagaacactcaagaacggaagagtaagagaacacctagtcctcactggctcttctgttttccttaccctgctgtatatccaatatttcagcatgttctgtcagttcttctttcagggaatacctccaacctgacccctctacaaccacggcctcagcctccatcatctttagcctggtggacttcaatggcctcttgaactggtttctctggcttttcctcttaaagcccgttctccataggacagccagatggatctttctagaatagcactgcccagtagaactcccagtgatgatggaaatggtctacatttttgctgtccagcacagtagccattagccacatgttgctatcaaatacttgcaatgtggcttgtgtgactgaggaactaaattttaaattttatgtaattcttactagtgtaaatgtaagtagccacatgtgcctactgtctagcatattggacagcaaagttctaaaatatcaataacactacttcatgcccctgctcaaaacctccccccatctttgcatctcacttataataaaattctttaacatattcctaagcgggctggcccttgactatctctgtgatctcatcttctatcttccacttaactcagaccatattgcccttcctactgtttttggaacacccaagctcattccaatctcagggccctggcacttgctgttcgctctgcctgtaacactcttcctcaagatttctacattggtcagccccccatctcattcaagtcttccacagtgaggccttctctgactattccatctcaagcaacctcccatatctcattctctatccactttacgctccgttattatttgtctattttttaaaactactgcccccattagaatgcaagctctatgaaggaagagatttgtctgtcttattcattattgtatccacagatactaggacagtatctggcccaccacagaagcctgataaatatctatgagatgactgaataatgaagaaaccagagtagggaaagaaaagaagacaatgaaagaaacagagaggagtcttcctggtaacttcttgaattttgtttggacatccacttttccactcacacagacaaacgtggaggagggctgtgtcaatcagcactgtactggacacagctgctagttcaggaaagggatataacccgatatggaacaatgaaaaatcaggagagctggaaaagatgcttcctctctcttgagaatgcttcttggacacaccagctctttcttgctccttttttgtacaggaacaaaaaaatgcatctaggatttattgtcagagtcgaaggcagagtagaaggagaaaatgaaactaggtcttcgatgacttcactgggtccctgaatacagcccagctgatcagtattataggctaataatccctctatgactttagccagtttgggtgtgggttttctgttaactacaactgaaggacaacagtgatccagccgctgcacatggtgacccatttcatgaagatggtaagcgttattagactgtagccatagagtttggaggaggtgaagtctatggttccagaactataaggacgctagtgggaaccttttgtggaagtttcagaaaagagcgtatatgtgtgtctgagttggcataagtagggggatggaaaccagagggtggggattaagaagaaaagggaagggagcgtctaggtgtcaacaagtctgaggagctgatgtgagggaaagtgggagggcagtgagaaagacaagtggtatcaggccaggattttttgtttgtctcagttaaagaggagagatgtatgatgtttagctgcaaggagaaaggcatgagtggacggaagggctggaacacgagggtgaaaggacactggcctccctggagctaagcaggagaggagctcatgctgcatgaagagatgggcttcagaaaggagaccaaggggagtactgaggagaaagggcacctaccagacttctcctggcccaggggactttgaggaaagctctctgactagcatttactggttccccctcctacaccccgggcttccccctcactactcaccttgacaaatcactgtatgtctgctgtctgtctccattgcatatgattcctcctcttccaggcgtgagataatgtcaggtttagagaactggtgccctgttggagaggaagactgagaactcagggtttcagtaactcccaaccttaggtcccaaagactctggaataataaggaaggaacaaactctcgcaggagtaaaatgaagcctgtttccagcctacagagattttaccccctaagggacatctaaaatgtatggagatatctttggttgtcataactgtgggagcagagggaggggttcctagtgtctagtatggctggaggcagggacactgctcaacattctgcaagacagccccacaacccgggacgatctggttccatgtcaagagtgccaaggttgaacaaccctgctatgaagactaaaaagggggcatgagggcagtgtgctgagctctacacttcagcaccaagaatctgacatagctgctcaaaaagtcaacattatggttcttttccctcctgggataacgtccactgcccctttgtcttgaagtgctgctcctccccctcccttagttccttgtttcccaaacttttatcatttgcataccaaattattatctatttgtttactgtctgactccactgaaatgtaacatccatgagaaggggaaatgtcatctattttgtaaccaaaatgcctataccaggccttgtatgtctgaattcactgacgagttaatgaatgacccttgcattttggcatttctacgtgccatttatagtcatattcagtatttatttaatgtttttctttagatcacctttctttttaacttagatatgcttattttcttttttctttttttttttttttgagacagagtctcactctgtctcccaggctagagtgcagtggcacgatcttggcttactgcagcctctgcctcccagatgcaagtgattcttctgcctcagcctcctgagtagctgggaatacaggcgcccgccaccatacccagctaatttttcgtagttttagtagagacggggtttcaccatgttggccaggctggtctcaaactcctgacctcaaatgaaccacctgcctcagcctcccaaagtgttgggattacaggcgtgagccactgcgcctggccaatacgcttattttcaatggaagctttatatcaaccctataaatggaaaccaatgtcactcacacacacacacaaaaatggaaggtaacatcatgataaatataacagaaactaaggttattgagtgctagctagcttctgttgcctatctaacattcagggtttgatgtctgctctcactttactaaaatggaagaataacaagatagacatgctaacaccaaactgatattctctacgtgataccatcagaaggcttaaaggaaaattgaagaacttctttttcaccaacagattgaaggattatgtcatgctgtccatgtactgcctaaaataatcttctatttagcccactgtactcattccacacttaggaagacaatgtcccaggtgatatataagatctctattaacacaaaaccttcagtgttaaagaagccaagggctcacaagatagaaatgctccaggtcactgcatgagagctggaatgatacaattaatttatttcctctattttgatactattccctctattttaagtcataaaatgtggtaagctagagaagagtgtaaaatatgctggaaaatgtacttccttgtaaccgataagaaccagagttaaacatatgcatccctgtgctaggtttggggtaggatgtgtgttttcccactaggtccctgacttgccagtggaacagtgtttgttttggattctgtttttcaggagacctcaagcccccaaaaaagccactgaaaaaggagcttggcactggcaacgtaaacttttcacttttcactttcaactttacctgtgagaacaggtaaaacaattttgcctccgcacgtaaagagagattggcaatctctgtttcttcaaactcaagccagtagaagtctttggagctcctggaatttttagcaattccttcgctcattcagtaaacatcattttgagccttccattgtgctgagaactggtggagcaaacccctgtctggtagcacatcagagtttaaaagagcagattctggagtctgcttggggttaaatcccagctttcgacaagtactttagcctttcaatgactcaggttcctcaaagttaaaaatgtcaataataacaacaacaataagtatacctccccctcacaggcctagtgtgaggattaaaggagttgaaatatgctaaacacttacacaagtgcctgacacatatgtcgtgctcaagaaatgttagctatgttataattaacagtgaatttgatattcaaatattaaaatattgcctctgacctgggttgagactcactgacatggtgaaccaccattactgatgagaggacacgaaggagttgagagctactgccctagtgggaagaaaccaagtcctgtggagaaggcatacttacccagggagaccaggttccggtaattctccagcatcacctccctgtagaggtttctctgagcagcactaagggaactaagttcctctgggctgaagtccacaagcacatcctcgaaggtcaccaactcctcaaacaccagaaatgttcctaagtgtttgaagtccgggaactatcccagagagaggagaagggacgtgattagagaggactgaacatgatgcaggcattcagaccagcagagagcttccacgtgctctaatccagagccacaggcacctggcattgcatctttctttgtcttatcgagtctgagagaagtgggaacattactgaaacagttcctattgctaattactacagatttgggttgagggggaaatatccttttaagccactttataaagacagaatgcaagcatgcaaatacttaaaagctcagcagtatacctcagcctcaggaatcagagtcctggctctggttctttgtgagtttgggtaggttaagcctcagggtcccacctgtaaaacaaagtgctcataacatgaagaaatattcaatcttgttaataaacaaggagatgaaaatcaaaatgacaaaataccattttatacccattcaattaagtattgggtaaaaattaagtaattgagtgaaaattaagaagtgggacaataccaactattatataaaacatggatccactggcgatgctaagggaaatgtaaattagaaaatcacttttgatccagaaattctttttttaatttttaaaaatttttgtgggtacatagtacttgtatatacttacggggtacatgagatgctttgatacaggcaggcaatgtggaataagcacatcgtggggaatggggtatccatccccttaggcatttatcctttgagttacaaaggataataaagagttacactctttattttaaaatgtacaattaagttattattgactatagactccctattgtgctatcaatagtaggtcttattcattctttctactttttttttgtacttgctaaccatctccacctccctccagccccccaactacccttcccagcctctgagaaccacccttctaatctctatttgaccccaaaattctattcctaggtatatttactcatgtgtacttaaagacatggatgggcatgtttattatagcatgtttggaacatccaaaatctggaaataacccaaacattcattaacagtagaagagataaatatagtatagccatacaatgaaatagtattctagcaatagaaatcaattaactacagttatatacaacaatcttagtagcctaaggttgaatttaaaaggcagataccatatacccaaaggaaaataagctgtcctaccaaaaagacacatgcactcatatgttcatcacagcactgttcacagaagcaaagacatggaatcaacccaagtgcccatctacagtgaactggataaagaaaatgaggtgtgtatacaccattgaatactatgcagccaaaaaaagaacaaaatcgtgtcctctgcagcaaccggaatgcaaccggaaacctcagatgcaacgggaaaccattatcctaagcgaactaacgcagaaacagaaaaccaaataccacgtgttctcacttattagtgggagctaaacactgggtatacatggtcattaaaatgggacaacagacactagggaatacaagaggaggcagggagggaggagaataaggattggaaaaggccatttattgggtactatgcttactatctgaggtgacatactcattcatgctccaaatcttagcattgtgcaatacacctttgtaacaaacctgcacatgtgtgccctgattctaaaataaaagtgaaaaaaaaagatagactgacctcttcaaatctaacattatcctgaggcaataggatacttaccttccttagcaaatctgaatatagaaaattgtaacacgtgtaagaaaatgcataggatctccccactcaaatatgctaatccaataagtctttataaacagttaatgacaaaaattgaaaattaaaacttactagccattttgctcaaaatgttgtagcagttaatgatttttctgtctgtttccagtcatactttggcaataaaaaaaatgattcaaaaccaaaggtacattgttgttaggctgaggtcttaacctggcaatcacagattcttaaggctgagctttgtagtgcatgtgcacctttctggaagataaaaattccgtttctcaaaggagtctgtgactcaaaatatttagcatagagagcaatctcagtttttcataaccttttttcttgtgctttattttacttaatacagttaatatgctacaataccttgaatataatggataatcaatattattatattaaaaaaagattgttaaaagagaaatgttacctgattcagtataagaaaattgaatttagttgtagaaaaggtatctatttcaagtaagaatcactgtatggtaggtcatgatttctcagtcacagtgtcatatttaaacgatggtggtcatgtggtagtcagagcatttttaagactgctatcttactgttcccaaatgttttcctactgttaactgtccattgaccctcctttcttttttccatctcatactctgtaactattagagaaaatcatgggaacaaacctacactggaataaggagttttgagttctgctattagctagttgtaaggcatgggttaattaatctctttgattctcattgtctcatctttaaaataaagagatccattacattatctctaaagtcatttacactctaaaattttataataaaacacataagatcccttgatactataaaaataaaaaggcagataccagaacattacataagactctgatatccattttattaatatacatcttttgtgttttaagtgaaactttctaaaactttttatgcaaatcaacaaacactggattaaattagggatcatatactggctgcccagctccttcagatgggtttatttggctcacgtggtcctattgttttttaaaaatttgtattagctgccaataccaaaaaaaaaaattaggaaatgtcattcttaactggttttgtggcttctgattaaaagcattagaaaatctggggactgggtccacattctcacatggcaccatcagcaaaagctgagtcacagctgcccctatatatgggacaggcactccccctgtttctcataatccacccagaccaattccttatttatattcccttggtagtccctccagggcatctttgcttggaatccctggcacagacaaggtagggacagagggctactctcaggagcagatattctagaacagtgtttctcaaccttttttccttacctcgctccccccaccccagtaatctttatacgtcattttttctaatcacaacccccatgaatttttttctggttctaaagaaagcagagtatattaatttcattattgtcttttaggtttctaaaacatgacttaacaagaacactggagaacatttttgaaacaaaaaatcagaaaacctcataacagtatcatgtccctataagagctgccatttgttaaaggcctacaataagccacaccctttgtgtgggtagaaggggttgtcttcatttacactattttcattgttgcaaagtacattccagcccttgacatggatatactttttcaaacaattataaattagcattgattcacatacacaggtattggatggttccaattttaatgtgcacacaaatcacctggggatcttgttaaacacagattctaattcagttggtggaagtggggccacagatgctgtatgtctatttttttaaataacagctttattgagatttaatttacgtattataaaagtcacctaaagtatacaatttaatgagtttttaagcatattcacagagttgtgcaaccatcaccccaataaatttcagaacatttcatcgccccaaaagaaaccctgcaccttctagcagtcactctccatttccctccaacatcttcccacgccctaccccaagccctaggcaaccactaacatactttatgtctccatggatttgctgattctggatatttcataaaaatggaatcgcacggtaccccatacattttaatatcgcaaatatactgtgtatgtactgtatgtatgtctgtgctgtacacataagaagaatagtatgtgttcaccctcaagaaccaattttcttccccttgaaggcaatatcctccttaagaatgcgtgttccaggacatgactttcaaggaaaaggcccttttcaattgctctgtgactttttggcacccccatatggttctaagaacacttttttccctcaaacagagcctgacaccggtagacgttggtgaataaacaaacagatgatgacactaccagaatcatttgtataatcttgtacaacctgaaaaaagttttatgtttgatgatttcattaaactattattcattattttggaggaaatacatggtaggacataactacctttcctttttttaaaattctggactattctagcctatccatgcttcccagtggaccccattgtctcaaatccccaaatccaaaaatttagttgaaataggacggccagataaaattcagcatgcccagttaaatttgaatttcactaagttttaaggggctgagtttttttaaatctttgacaatttcattcatggatagtgtgttgggtgggaagagcactgggctggcagttcagagacctgggttcaagtactgtactgttttattgttttttgttttgttttgtttttcttgtttgttttttgagatagagtctcactctgttgcccaggctggagtgcagtggtgcaatctcagctccctgcaacctccacctcctgggttcaagcaattctcgtgcctcagcctcccaagtagctgggattacaggtgtgtgtcaccacgcccagctaatttttgtatttttagtagagatgcggtttcgcatgttggccaggctcgtcttcaactcctgacctaaggtgatccgcctgccttggcctcccaaagtgctggggttacaggtatgagccactgcacccggtctgtactgttatttaatttcattggacaagacaggtaacatctctgatctggaccttgatctataaatggtcattgtactttttgtatcatagggttttgtgaagaacaaattttgttatgtgtctattaaaaatcttttttggttttgtttttgttttttgagatggagtctcactctcactcaggctggagtgcagcgacatgatcttggctcactgcaacctctgcctcccaggttcaagtgagtctcccacctcagcctcccaagtagctgggattacaggcatgtgccaccacgcccagctaatttttgtatttttagtagagacggggtttcaccatgttggtcaggctggtctcgaactcctgacctcaggtgatcctcccaccttgggagggatattggcctgaaattttctttttttgttgtctctgccaggttttgctatcaggatgatgctggcctcataaaatgagcctctttttctattgtttggaatagtttcagaaggaatggtacaagctcctctttgtacctctggtagaattcggctgtcaatctgtctggtcctgggtttttttttttttttttttggttggtaggctattaattactgcctcaatttcagaacttgttattggtctattcagggattcgacttcttcctggtttagtcttgggagggtgtatgtgtccaggaatttatccatttcttctagattttctagtttatttgtgtagaggtgtttatagtattctctcatggtagtttgtatttctgtgggatcagtgatgatatcattttttattgtgtctttttgattttttattgtgtctatttgattcttctctcttttctcctttattagtctggtaagcagtctatctgttttgctgatcttttcaaaaaaccagctcctggagtcattgattttttttgaagggtttttttttttgtctgtatctccttcagttctgctctgatcttagttatttcttgtcttctgttaacttttgaatttgtttgctcttgcttctctagttattttaattgtgatgttagggtgtcaattttagatctttcctgctttctcctgtgggcatttagtgctataaatttccctgtaaacactgctttagctgtgtcccagagattctggtacgttgtgtctttgttctcattggtttcaaagaatttatttatttctgccttaatttcgttatttactgagtcattcgggagcaggttgttcagtttccatataatcgtgcggttttgagtgagtttcttaatcctgagttctaaattcttttccttaagaatgttgatattgacctccactctcttctggcttgtagggtttctgcagagagatctgctgttagtctgatgggcttccctttgtgggtaacccgacctttctctctgactgcacttaacattttttccttcattttaaccttggtgaatctgatgattatatgtgtcttggagttgctcttctcaaggagtatttttgtggtggtctctgtatttcctgaatttgcatgttggcctgtcttgctaggttggggaagttctcctggataatatcctgaagagtgttttccaacttgttttattctccccgtcactttcaggtacaccaatcaaacgtaggttttggtcttttcacatagtcccatatttcttggaggctttgttcatttcttttcattcttttctctctaatcttgttttcatgctttatttcattaaattgatctccagtctctgatatcctttcttctgcttgatcgattcgctattgatacttatgtatgcttcatgaagttctcatgctgtgtttttcagctccatcaggtcatttatgttcgtctctaaactggttattctagttagcaattcctctaaccttttttcaaggttcttagcttccttgcattgggttaaaacatgctcctttagcttggaggagtttggataaacaacagttttttacataagtatgtcttaaatatgaaacattgcatccttatgcaaaaaattgtctatctgaaattcaaacttcatagttatgctaaaaatttatttatacttatgctaaaaatttatttgtagttcatctaaaattcaaatttaatttggatgttgtgtatatttacttgctaaatccggccagccgaagttgcagtaactgcactaccttaggcagcaataactaagtggttatgaatgtggactctaaagccagactgcctgggttcatatctcaatcgtattatttaacagctgtgttacccttcagcatattatttagtctttctgcctccactccctcatatataaaaaggggaacaataataatgcaaaccacacaagggtttttctgaataaaatagaatactaaaaaaataagtaaacaattaattcaaaagacagaaaaaaaggaaaaatattaaatatatagtatgtgggatggtgataagtacaacagagaaaagtaaagcacggaaggaggataaaagagtcagaaggatttttcttggagaaataagaaaaaaaagaatcataagcaaatgtcagattagtcagaaaaaaggctcagtaaagtgatatttatataaaaacttaatggaaatgagtatgtggtttaattaaataaggaagtccacaaattaggaagataagatccccatatttgataaccatgtcagaggaaagcctgactcacctgggacccagcagatggcagattgtctaacatctctgtgttcctcttttctgcagggacagagtcctgagcaaggaaacctagaagggagagaggaataccatggaattgagtcctgtctggtagcactgacagacacagtggccagccaccctcatgccaccctgtcctgccatgggaaggaacagcagctctagagttcctatggtgagaaagtcagatatcatttctcaactcaaaataacaagttccaaaagagagctctggttatttcccagctctaaatgcttcaatggctcccactgccttccaaataaagtgaaagttccctccatatcagtcatttcgggcctcactgtccagtcaagatcaccacagaacctctgtttctcaactgtaaagcagaaataatgacaatacctatacagtagtccccacttatctgaggttttgttttctgcagtttcagttacccatggtcaattgggggtcaaaaatatttaatggaaaattccagaaataaataattcatatgttataaattgtgtgccattctggtgatgaaatctcacactttcctgctctgtcccacctgggacatgaatcatccctttgtccagtgtatccactctgtatacactaccccttagtcacttattagctgtcttggtcatcagatcaactatcacggtatcacagtgcttgtgttcatgtagaccttattttacttaataatgcccccaaagcacatgagtagtgatgctaacctactgttataattgttccattttataactagttgttaatatcgtactgtgcctaattaataaacttcgtcacagatatgtatgtagaggaaaagacatagtatatatagggtttgataatatccacactttcaagtgtgttagaatgtatgcccctcagataaggggagtatactatacctctaagggctcttgtgagaattaaacattacatatgtaaggcacacagtaggtatttttttggtaaatggcagctcttatgattaagcctttcctacatatttttcactcgttgatctaaaagacaaccacccctttccctccaggagccttaaccttgatggccttccttgcctatatattctcttttctcggtaaacccttcattaatctgttttttctttctggtaccctagggaactctctttccttctcactgaactctagcttcatcaataactcagtgcctctggccaagtttttagcctctgggacaacatccactatatccatatgaggcactcatgtaacacggtgattaagagtacagatgctgaagccagcagcctaagtctgaatcctgactgccaattattaatataagttgtggaaccatggtcaagttactcaacctctttatgcctctgtctcctggtctacgaaatgaaggtaatacctatttcacagagctattaatagaagaaaatgaattaacatgaaagaacacctatgataatacattaaaacattctaagtgctcaagtgttcactattagcattttaaaaattcttttaagtaatgtgggagcacagaatgggattaatcataatccttagttcatgatatgctatctttattgagccatgcatggctctcatggttattttaaattcatttgtttatatttttaagtataattaaggcctgtgaatgtactatccaacccaaaagtataacattcccaataacttacatctgcctgtgtgcttctttcatgtccatactcgagccttccctctagagataagtatgccctgaggtctggtgttagtattcattgttcccttgctatatatatgccccaaacaatactttgcttttagttagtattatttgtttcaaagcactataaggacccagtggctttcttctctcattcttgaaatgcctccttagctctaatctaataacttgagtttctaagataccagtcaaattttggcagaagttgaacttccagtctttgtatctcccacattttatgcccccttgcatctaaaatttagctaatcattcttgttcttgaatagaaagactaaataatgtaaagaccaattttcccaaatttacacttaatatattaatgccacaagcaatcccaggagttttttttttttttttgtagtgtgtctgtcttgttttatgttgcaactaaggtttacactggataagaaatgtgaggcaaggtgaacaaagctgatacactcagagaaatagtatatgttaaaagcaaaagccaaacccacataggcataaaaaggaatgaaatcatgtcctctgcagcaacatgggtgcagctgaagccattaacctaagcaaattaacacagaatctgcggtggctcttgtctataattccagcattttgggaggctgaggtgatccacccggatcacaaggtcaggagttcgagaccagccctaccaacatggtgaaaccccgtctttactaaaaatacaaaaattagccaggcgtggtggtgggcccctggaattctagctactcgggaggctgaggcaggagaattgcttgaacccgggaggtggaggttgcagtgagctgagatcatgccactgcactctaccctgggcgacagagcaagactctgtctcaaaaaaaaaaaaaaaaaaaaaaaaaaagagaaaaccaaatactacatgtttccgcctttaagtgggagctaaacactgggtatacatggactctaagacgggaacaataaacacggaaaattccaaaagggggtaatgaggaaggagggcaaaggttgaaaaactgcctatccagtactatgttcactacttgggtgacagaatcattagaagcccaaacttcagcagcatccaatatacccatgtaataaacttgcaaatgcacccctgaacttaaaataaaaattttaaaataacccaaacaccaaatttctttcatctcacatgagattaggcagatcagactgaatgtataaaatgcattctttcattcattcactcaacaaaatttctatttagctcctattacgtgccaggcatacagcagatattcaataaacagaagcagccagttgcttcctccttctcaccttccttctcacatgcctgaataaagtttgccaccatggttcctgcctctttgctgttcttgggctgttttgacctcacccatgtctgaatctcctctggcagggtgctcagaaactgtgtcagcactagttgctctatcatctgctccttggtgaggatctctggctgcagccattgcaaacagagctcctggatttggctcacagcttgatgaggcccattcactgacaggtactgaaaatccccaaacttttgatgagaaactttcagtgtctctgtttctagtttcttctcttgaccacacacacaaaagatgtagggattcctcaagatatctgaaacccctgtcacatccagcatctctacaccttggccctttacaggacagagctactcttaaaggcaggctgctccagtacacaatgttgtggaagacggtaggcagggctgtatcagctgaaaggatacagaaacctcaggacctgcagaaattacatacagacttacaactagcctgcatagttatgattggacagtggagtgaaggtgatctgaacaagtattacacaaaagatgacagctataaatagccaatcaacataaaacaaggctaaacttcattagttatcagagatataggaattaaaaccccaataggataacactatgcaccctccaaaatgtccaaaatgaaaaagtcagacaataccaagtgttgacaaggataatagagccacagtaggatgatatatttgtatattggaatgctaaacagaaaatatgaatgttaagttgctgttgaatgaaagaaaccaggctcaaaaaaaaaaggtctgtattatatgattccatttatataaaggtcaaaaacaggcaaaataaacctaaagtgtttgaagtcagaatagtggctgctgttggggggaagggtggtaatgactggaaccaggcattagggcttctggaaagctaggaatgatgtggacacagtgtattcactttctgaaaactgagctacacatttgtggtttgtgcccttttccatatgtatattttgctaaacatttattagctgtattatagttgtaggaaaacatctagtcataatatcaagcggaaaaaggaaacctgtacataacaatatatgcttacccatataaagcagagaaaaggtggtaaaccaaaatactgtgccagtgggttaagtacgaacggtaatattataagtgatttttataggtgattttgtactttctctcaaaactattttctagcttcaagatgttctacaacaaaccttcatttcttctgtaatcacagaaataaaacataccttccataaaggctacactcactctaagaaaccatgaacaaagatgccacttggggaaaacatttttttcttttcttatccccactaaaacttacgccttttatttctataatttaacagtttttccatttgaaagcatttatttttgttttccattagaaatcataacgtaatgaacatcactgaaactaagtatttgctcccaaattacatagacaaaagggataaactgtttttaaaagttcttgacacaatctgccaaattttcctttcaacggctaccaacttcttcttccaaactcaatgtataagattacatgtctcactcagtccaccttacaagccaatagtgccatcttcatgggcttgtaatcagggcagtcacaagagccccattctcataaagcccacaggcctagtttaatgctttactgtcactctcttgaaatttttcacaattttttggacaaggagccccacattttcattttgccctaggccctgcaaattatgtaactggttctgccaatcaagagcattatcatccctcaaaatctgttgtcaattagacagattgaaaaatatatcattttattctttaattttacatttcttttgattaataatacggctttctctttgtttcagatttacaagccaattataaattgttcacgccctttgtgcttctttacattggggtgtttcttttttttcttttcttttttttctttttttgaggcagagtctcgctcagtcgcccaggctggagtgcagtggcgcaatcttggctcactgcaacccctgcctcctgggctcaagtgattctcaagcctcagcctccggccttggggtgggctccaggcccaccagcgcagagccgtcctgggtccctccctgcaggggcaccgattttagggcagtcagacgcagccctcgcctctggggtggcttttccaccacaaggccccagtagggcccgccgcggagtcttcctcacgaagccgcgcgctgccccgcgctggatgcctcttgcgccctcaagtccactggggccccagccccgcccaggcccctggctgggctacccgctcgccggccgctatcctaccccgggcccagcgaacttacctcgcacgcctcacgccctggcctggctgaacgtctccacgccctgaccaaaaccagcagcgcatgcgccgtggctggcttgcgcgtgcgctctgcggtggacgggctgaggaaccacagccgctcctggccaagtgccctgtgagacacgaggatagggttggtacggcgaggagaagggcggcgacgtaggagggcgctcctgtgaccttccttcttaaaactaacgccttctgttggtggtgggcgcctgtaaccccagctactcgagaggctgaggcaggagaattgcttgaacctgggaggcagaggttacagtgagccgagatcgcgccactgcactccagcctgggcgacagagcgagactccacctcaaaaaaacaaaaacaaaacaaaacaacaaaaaaactaatgccttatgtaagttttggagagttaatatgttacttagaacttgaggataagtggtaaaaataaaaaataacaaactaatttcaaaaatttgaaaataagcggtagtcagtgaaaacccttcctcacaccacgtgtgcaccattcaccaaaattttacccccaaaacatacgtaaccactgtaactgatctgaagtgccccaccaatgtttctttatacttgtagaagaaatgtatatgtatatgtgtgtaaggcttccctcagtattcctgggggatttgttttaggaccccccagggtatcaaattttgtggacgctgaagcctcatgtaaaatggcatagtatttgcatataatctatgcacatgcttaggcatactttaaatcatctctagattacttacattacctagtacagtacctacacatcattcttgcggatttgacagtacgcagcacacatggcaaatttaagttgtggtttttggaacttggtggaattttcttccaaatttttctttttctttttttttaactttgttagagatgatgtctcactctgtcacccaggctagagtgacagaacagtggcatccccgaagctggatgccactgctgcaggttggctccactcatgcccgaacctctaagctggaggctgatccccgctggagagcgggtcagtcctctaggcccagaaatgaccaagcaaagcttaccctctggctgctcacccatggacaactggggtgagcttgctcagtgagtccactaaaggtcccccaggcagtggggggtggggaggctgaccatatgcccagaatgagtgggacaaagagcaggcaaatgaaagcgttgccagaaaagggtcttgatccaaaccccaaaagagggttcttggatctcacacaggaaggaattcaaggcaagtcacagagcatggtgaaaaaggcaagtttattagaagctattccattacagagtagggtgtcgtcagaaagcaagcagacaaacacaccatctttgttttaagtttttaggggtcttgtctacgtaaagactaaactaagctgtgactacgtgagggtgagctgaaagcatgacaaaatttattattctattgatttaaagaggccaggcacggtggctcagccaggcttggtggttcacacctgtaatcccagcactttgggaggctgaggcaggcagatgacctgaggtcaagagtttgagaccagcctaatcaacatggtgagaccccctctctactaaaaatatttttaaaaaatagctgggtgtggtggtgcacacttgtagtcctagctactcaggaggctgaggcatgagaatggcttgaactcgtgaagtgcagtgagctgcccactgcactccagcctgggcaacagagtgagactatgtctcaaataaataaataaacaaataaataaataaataagctgtgactatgtgagggtgagctgaaagcatgacaaaatttattattatattgatttaaagaaaaccatccttagaaaggtgagagaggaattgaagggttgacagtgtagactacagaaccaggaaatgacctaccagcaagtcttttatgtgtgtgtgttcttttctatttctttctgtttattcctgttagtgtttgttctcttatgcctgtgaaaacctcctacatgtcaatttccatgcactggaggaacttggatttctccccgtcttaaaagtacctctttcttcttctcctccttcttcccctcctcctcctcctcttcctcctccctgaggccctaaaaacaaggtggccttggctgctctaccaaaaggaggatgattcagaggctgtgagtttaagggaccacttttgggggattggaagaaatctccattatgaggttaaggtacctatgggagactacctgagacagggtgccagtgatgcccactagcctcaataagacaccagggatgcctgagtgcaatggccaatatcggttttgtgcacagtaaggaaaatttagagcttaaatggttaatctgctgctacagagttaagtagaatcctctaaagctccatatcttcctttcttttcttctctgccagctttgaatctgctgttattaagttgctggtgctgaaataacacttattatttatgatctaactgaaatgggaacactggaaacttctttgaaactgaagaaaaaaatgaaaaagaagtttttacaatcaaaactgccatgaagactgctttacccaaaattttggtccacagctttcattgaattacttatcagggcaaacaaagtttagccatgtgaacacgttccaattttgttggaaataatttggatccagctatctttatacaatggtgagttcgtattgcatctcatggctaaaatactgaggtaaaggcttttggatctttgtgtgtgtgtgtgtgcatgtgacaaaaacaagcaatggggaaaggagtccctatttaataaatggtgttgggagaactggctagccatatgcagaaagttgaaactggagcccctccttataccatatacaaaaatcaactcaagatgaattaaagacttaaatgtaaaaacccaaactataaaaaccctagaagaaaatctaggcaataccattcaggacatgggcacaggcaaatatttcatgacaaagatgccaaaagcagtagcaacaaaagcaaaaattgacaaatggaatctaattaaactaaagagcttctgtacagcaaagaaattatcatcagagtgaacagacagcttacagcatgggagaaaatttttgcagtatatccatctgacaaaggtctaatattcagcatctacaaggaacttaaacaaatttacaagaaaaaaaaacaacgccattaaaaaatgggcaaaggacgtggacagacacttctcaaaagaagaaatttatgtgggcaatgaacattttttttaaaaaagctcaacaccactgatcattagagaaatgcacatgaaaaccacaatgagataccatctcacaccagtcagaatggctattacttaaaggtcaaaaaacaacagatgatagcaaggttgtgaagaaaaatgaacacttttatacgttggttggagtataaattagttctacccttgtcgaagacagtgtggtgattcctcaaagacctaggggaagaaatatcatttgacccagcaatctcattactgggtatatacccagaggaatataaatcattctattataaagatacatgtgcatgttcattgcaaaatagcaaaaacatggaatcaacctaaatgctcatcaatgacagacttgataaaggaaatatggtacgtatacaccaaggaataccatgcagccataaaaaggaacaagataatgtcttttgcagggacctggatggaaccagaagccattatcctcagcaaattaatgcaggaacagaaaagcaaataccacatgttctcacttgtaagtggtagctgaatgatgagaacacatggacacatggtggggaacaatacacactggggcctgttgcagggtgcggagtgggagggagagcatcgggaagaatagctaatgcatgctgggcttaatacctaggggatggaatgatctgtgctgcaaaccactatggcacacatttacctatgtaacaaacctacacatcctgcacatgtacccctgaccttaaaataaaagttggaaataaaaaaaaccctaaacatatacctactacctgatccagtgatttcatttttaagtatttacccaagagaaataaaaacatatggccacacatgcaaaagaaatacttgtacatgaatgttcttagcagctatattcataatagccaaaaatctggaaacagcccaggtgtcaatcaatagtagaataaataaccaaagtatgctaggttcatgcgatggaatactacactcagcaaaaaaggaacaaactgcctatacatgcgataaaatggatgaatatagaaaaacatgctgagtgaaagaagagttacacaacgaatgcatgctgtgtcattccattcatgctaattctacaacaagcaaaactaatgtgtggtgaaaataaattggtggttgcccctaaggagacagagttggagactgattgatgaggagcaagagggaattttgggattgacaatattgttttgtatattaatagagatttgagttacacaggtgtacatattttccaaaactcattgaataatatccttaagatctgtatgttttgatgtatgtaaatttgacctcacaatagaaaaaaaagaatccttaaaaaaatgaaagaactaagtacatataaatgggaaaaatgcttgtagacagacttttcatgtaatttaaaatcttataattatcttgaataataaatactcattagatgttgggtgttttccaattaaaaatgggttataatatgaaaaaaacatgtttctaaaaattacagaatggtttcagctataaaatgctaacatctgataaacagttcaagatttattgcttcctgagttttcactaaaatttaaggttactaaaagtaagaattgcaataatatataactctgtaagttgtattcttattgagaaaacaataattttatgtagtttagaggttatttaaaagttatttatttaaaaaggtagaaaggaaccagtaagtaagagagagaaagagagaaaagatttttagacataaagatgtatttttggtaagaaaagaaataattttatataagaaaaggatttcatgtggtaaagttttgtcctaaaataaaatgaccgattattttaaaagaggtatgatagaacaaatcaaaaggtccaagcatgtcatagatggtctgtgtaagttcatgatcaagtctgtggaagaaaatttataaaaggaattttgtatatgattaagttggctataattaataagaaattattcataatagtctttctgagattggtcccctatgttaaaacaaggtttcttgatggtattactttttttttttttttttttgagacagagtcttgctcagtcacccaggctggagtgcagtggcacgatctcggctcactgcaacctccgcctcccaggttcaagcaattctctgcctcagcctcccgagtagctgggattacaggtgcccaccaccatgcccggctaatttttttgtgtttttagtagagacagggcattcatcatgttggccaggctggtcttgaactcctgacctcgtgatccacctgcctcgccctcccaaagtgctgggattacaggtgtgagccacctctcccggtctctttatggtattaatttactattaatgagattgtaagaggttttgatttttaattctataatctttgacctatagctcccttatcctcagtggcctctgcaggcaacacactccctccttaccaatccccttcagactctgctgagggactcagcccagccactacctggagcaggacatttaccagccttactctatgatgccccttccagcagatccccagtgcggaaatagagatgtttgctgtacattttcccttcacaacttcagagctttataacggaaagtctcattctaaaggactaagggaagatcctgaggggtttcaaaacctcattcagaatagtttcagacccatgacctcaactgggcagacgtccagtcccttttaatattctcctcagtgaaacagaaaaatacctctgctctcaaaagggcaagggaggaagtggaccaatcccatagagaagagacaaacaatcctattgtagctctcagagcacagcagacattagacataaactccaaaaagtaaaattagagctcgatgctctcatctcaagactagtagacctggccaataaggtgtccaacaaccgggatagggatgaagaacataaagaagacagagaggacaaatggcaagcccacctactggctgttgccctcaagtgccagctggataactcacaggatacctatccataaagtaccacagctgaagagagtgatcccaggtcccctaactaacagaaaggatcctaaagacctaagggactaggaccaaaccaacatgccctctataagggggaggatcactggaaaagggactgtctccttcatgtctgaagggagggggaagagggcaggttccaccaggtgcctcacagaggcagatggtccaagtagtaaaaatgacaggtcctggggactcctcaattggccctccaggtgtccatcccccaggagcccaggctgacactgggcatgaggaacaagcctgttgacttcttggtcaacacagggggccacctacttggttttgaataccctcaaggataaaattacccaccaaaattgactatggaaacgtgagggaaggcaaaagatagcccctttattgagctcctaaaatataaactagatcaaacgagatgcactaaaagggatggccccaatgattaaaaagcttagaaaacagggacttctgagggcctgtcaatccccttgcagtactcctatcctccgtgttaagaaatcaaatggaaaataccaattagtgtaagatttaaggacaattaatgaggtcacagaaaacagaaacccagggtacctaatccttatactctatggtccactctgcctccaagttgtacatggtactcagtcctggatctaaaagatgactttttctgcattccactggccacagactctcagcctctcttcactttcaaatggcaggatcctcagacaggcaggaaacagcaactgacatttactgtgttgacccaggtgttcaaaaaacttccccaaaatatctggagaggccctagccatgaagctggaggatctgaccatttcgaatggatgggagaatgtgaccaagcattccaaaagctaaaaacccagctcacgagagacccagaattagccctacctgatttaagcaaacctttccatgtttatgttcatgagaggggaagaattgccctaggaatacatattcaaaggttggacccactgacctgggtaatgatctacttttccaagcagctggactcagttgctaaaggatggccaccttgcctttggttggggatggccatggccaccctttcaaaagagacaaaaaagttaactgtctggactccccaccatacccagaccctcataaaagaaagggggcagaagggctgtccccaggcaaggctctccagttacaggtaatgcttattgatgacccccacataactttgaaggtgtgtaacagcttgaaccctgccaccctctttccatctgaagatggttacctatctcacaactgcttagaggtgatggtgaagtgtactccagtagcccagaccttaaaagtgaacctactgaaaatgtggaagtccaatggttcactggtaggagcagctatctgcaagaggaacagaggagggcagatgtgctatgttctctcccactgaagttatacaagccagcgctctcttgccaggatgctcttcacagaaagcagagcttgttgctctaacccaggcgttagagtttggggaagggaaagtcctcaccgtatacactgattccaggcacgtgtattccatcttacacccacatggggctatttggaaggaaaggggcaggttaaactcttaaacgttagtgccatcattttaagattattggaagctggaagaaaaccagcccacatggcaatagtccgttgctgaagccaccagaagtgggacattgaggtaattaaagaaaataataaagccaacctagggtcaaaacaggcagctttagggaaggtcacattccaaatgccacttttgcctttcctcctgggtcctgctcttttaaccccagttttctctcaaaaggaatggaaaaaggcgaccaaatggggttataccaaaaatcctgaccatccaggatggctaataaaccctcgtggacaatttcttttcctaaaaacagttgcactgcaggccattaaaaaggctcactctaacacccactttggtgaagaaatcctttataactgattttgtgaaagcatgactgtcccaaacttcagggagtcaatcaaaaaggtggctgggactcatcccacctactatgttaataacccctgatacccaccccacgtggggatagcaggggtgagaggaactcagagagggctcctcagctggtccagttccaaggtagatgtccaggggaagatgagaaagttttcatagttatgcccagaggcctgggaaactttaaatacctcctgatcttcactgacaccttttcagggtggatagaagcctttgccacctgcactgacactgcacatcaggtggcaaaggtgctattaaagaaagttgtcccaagaattgggctgcctcagtcaatccaactgagggaccagcattcatatcttccattactgaagctacttctcaaagcctagaaacaagatagcacccacatgctacctggagaccgcagtcttcaggtaagcaatgagtaggtgtagcgatttctgtcaagactattattcctacctaatggttatttcctcttctacatgcttgacgtactatgatctcatgtaaccctcacaaggtagcctctgttgttatttctccattttacagaagaggaaactgagacaagaaagcttcactaacttgtcccactcagtatgattagaatgggacaggcagagggttaggattagaagtgtgcatctaaccttcttcaagggtggaaatttccaatcagttatgttacaaacatttgtaaaataggcatgttccaagaatggtacaagtaatgcactcacttaaaccttatagtaaccccgtaacgggggtactaacaccagccccattttacagatgaggaaactgaggcacagaatagttaaggaaataacccaagattgacagctgttagtggcagaggcaatatttgtgaccaggcagttagaccccagagtctgggctttcagcttcaccaggctggcattttcagctgcgaggcatcagagtagactggagggttgggtctctgctctgtcccccttcctttgcagaaccatccttcctctgctccagggtttttcagccttggctctactgacattttgggtcggttcattctgtgtcctgggggtggggacactgtcgtgtgcattatagggtattgagcagcttccacctatgagatgctggtagcatcaccccttcagttgtgacaaccagaaatgtttccagacattgccacatgtcccctggagggcaaatcgttcaatcccatttgagaaccacagacttactccacaatttcattgtttaactttagggagagtctgggaccttccactgggaagggccaggcacgcaactcaggctgggccaataagagtcctacatcccccagttgtggattggttctgcagtagacatgtgacccatcatggaccaatcaaaatattccccaatccttccttacttgctttatctaagtgtctcccactgattgtttattagttgcaaggagggaaaccagaaagtattcagtgggtaaatcaggcaaccaccttgactgggtggatcaaaactagcatcaccagtgatggcatatggatctcttgtgggttaaaacgtgaggtcctgaaaggacacagaatcacttatgtggtattccaggaacgactgcataacctgaatctaattcataggaaaatggccccccaaaccccaaagtgtgtcagagtgtgacttagaaaccaaagaaaggctgaggaggttttccagattaaaggaggctactttacaactgctaaacacaggcctggtcctagccctagaaaggatactgtactggagaaaaaaagaatatttaaatggagggtatttagcaagttgataaaattggaatattgacagatttgataaaagcactgtgtcaatattaaatgtgcaaaggttataatagtacctcagttatgtaagagaaaattcttattcttaggtgacacagactgaagtattcagaggtgagctttgtgatgtgtgaaatctatgcccagtggttataaaaataatgtattaggtatatatataatagagtgtgcaaatgacaaaacaaataggagaaatgttaccaatcagtgaagatgggtgatctttgtactattcttgcaactttcccatgagctttaaattatttcccaatatttgtttgtttcattcctgtaatgaagagcccccaattaatagatgcttaaatatgacagatgtttatttctcatgtaaaagcctggataggtagtcaagaatcatcagacataagctcttatctcattactctgacatcttcaatacatggcttcccttttttgatccaagatggttgctccagttcctaccattatttctacattccagcctgtggggaagggggaggagagagtagaaggctggttgtgacctggaaatcacacatacctttactgtgctcatcccatggaccagacattagtcacatgcctacttctagctgcaagggaagctgagaaaatatttacttcttctaaatagccacataaccagtcaacatttagcaagaacaggagaatgtatattgggagatatattgttactgccttcctccccgtacatactgctgtggtctgaatgtttgtgtccccacaaaactcatatgttgatgttcaaaccccaatccaacagtactaagaggtggggcctttaggaggtgattaggtcatgagggctaagccctcatgaatgggattagtgcccttataaaagatgtgcaagggagctacctagcctcttttgccatgtgaggatgcagcaagaagtcatcatctttgaagcagaaagcaagccctcatcagactccatatttgctggcaccttgatcttggacttcccagcctccagaactgtgagcagtaaatttctgttgtttataaattccccagtctaagatattttgttatggcagcccaaatatacacatactcttggttccatgagggcagggaccatgtctgatttgtcccccacagaatgccaaatgccccaaacagtacctgacacttacaaatggcccatcaattattgaatgaattaaggtggcttgggagttcagagtcagagaaattttaagaagaccttgcatggagaagagacctcatggttcttgaataaaaggcaaaacgtggttataaaccaaaatgaaaattgacttctttcccagtgatccctgaagactaattcaagatgacaggcaaatgaccaacgtatccctttatgcgcttcctcatgatgggatgagggaaaaaatagaataaagaacttaaatcagaattttttgagaaagtgagttcccatttgtatcatgttatgattatacagacagaaactttccatatgttcagctgtgataggatagattcccttgaaaataagtcttcttgagtttggaatggtcatcaatatctctgacagggcaacaacaacaaaaaaacatgtctaggccaggcacagtggctcacgcctgtaatcccaggattttgggaggccaaggcaagagggtcacttgagccctgggcaccatattgagatcctgtctctacaaaaaattaaaaaattggctgggtgtggtggcacctgcctgtgatcccagctacacaagaaggtgaggccagaggatcactcgagcccaggaggttgaggctgcagtgagctgtgtttgtgccactgcacttcaggctgggcaacagagtgagaccttgtctcaaaaaaaaaaaagaaaattaaaaagaaaacacatttgtgctagaattctctgcttgcaagtaacttaaattcattcaggttaatttaagggggaaactggatcttactggaataatattgtgtagcttaaaatagtgagtaaagagttatcagtccttctagtaggacagcaatcaaagaagacttgttaatctcactagggggaaataatagactgccttttctcagtgtggccataagaatgactgggctttgaacaccttcaatccatgtattgctctactgaaaattcaaattcttgggtgaggaagtctgactggtctaccccaaaccatgtaattagtcctttgctggcatgagggaggggcagggatggtgatcagaaggaatggggtcaggatagtccaccaaaaccatgcagtgtgctgttatttaacggatgctgggcatacagaagagctatcctggacaattcaccctttggctttgtggaagaaaccatgcaattatcacggggaaccttcttgaactactttggtttgagagtagtctccccagattttttctgtactccttgctgcttcatatggtatataagtggtacgaggcatgcagtaagtcagcagacattcctgagaggctggtgggcaggaaaagtcaagtctaagtccagaatgaatctctattccatgaggctacaaaactgccctttctgtggttaaaagggcttggtatgatcaatcaatctgctgtctggctggtggggagatatggtaccagtcctggcttcttcatcactcctgcctttctaggggaggagtgacttaaactcgagagctggctagcctgcagacagtgtatgttcattgctcttcaccctgcaatgttctgatccccaacaattagtgtttagattcaacatccactaatccttgagaggtttgtcaaaaaatggattaaccatgtaaaagaaaccaagggcaggcagttcagccagactccacaaggcactggggtggatgaggcaccaggaaccaggattccctctggctttatggtctatttccttctaggcctgtttattcacaagtatacccagccccaacccatatgaccacctaggtagccctcactctgagtctgactggacacggggaacctatgggcatcaatcaactgacaccagggagaggtcaagtctaacagaataagcatagcagtagggaagttagttaccccttcaactgggttgtggggtggaggaaggaattgcccaagagtataaggattggtcaaacaacccctaatgacacctacttcattcccttcctttacagcctcttgtaacacattatttaggaaatccatccttaaaaagtcccaatcctcccaccctgacctatgctgatgctcgtcacagaatgaccatggaagctgtgaccaaatagtcagatgccacaagatataaagttctaagaacatgaaagaatgcaggactctgtcaaatcctagttagaattagtggcaagtacacttttatatcttaagaacaaaatccaatcatgtgacatgaaggatattagacgggcatgaagtacacaatcatctcctcctccgacttatggaatcagggacacagcagccgcaaattgggtatggtgctatccactgtggtcgccaacagggttccagttagcaagctggttgaaaagctctgatcattatggaatcacaggcatgtttaaaaattactctcagggatgacaatctactgaattgcatgggatgtttctcgtggggaagtcaggttaaagtatggttaatgaacttgggggaaaaacagtacagagatgacccactcaggataattaccttttaacctcaggcaagagtcaggaataaacacttgagattctataacatagtatcaacacttttatgttaagggtttattattgtctgtgattttttatgtttgagacaatctcacatttccaattaaaaatgcccactcaagtaactaagatgtacttgcggtcattatcaactttaaaaaaattgttggaacatatgttttagtttcataagggcagttacaaatgtgaaatcaaacagtatttaaaaatcccttagaagtaattgttgaaatagataatacttaaaaatagagtaagatttgcaaaccaaactttttaggctaaaggaggaactaagcttttggatttataactctaacaaaataacatatttaaagccccaaaaacaaaacagacaaaagagactgagaaatatttatttttaactttatttttattgttgacactattacagatagaatgaccacaaccatattaacaaaccaaaaacctgtgcacagaaacaagatgaagaaaatatatcaagatgttaaccacactctttggatggtgaaaacatgggtgagtttctcttctacatttctgtaacttcaaagtttctataatgaacacatttcatatataatggaaatatatgtagtaaaggtggactaccaaaacactagaatgatgacctttcaaggaaaccgaaacaaaataaccataatcccacaacaaccacacaactatttcttgtttttcatctttcttcccatctttgacatttatgcatacttatcactaacaccctaataatcacagactagtgcacagatcaagatgttaacagttaattgttgttgggtgttgggaatatgtgtgaattttctttactgaatttccaaagttttgtatgagtatgtattatatttgtaatggaaaatacatacataaaatttattaccaaaacaccaaagattatttaaggaatttgagacaaaatatttaaccaaattcccacaatgacaacactattttagttattttccacatcttttcatttaagactttatgcacacatatttaacactgttatcacaagcgtgtgcactgaaacaagatagaggaaacagatcaagatgttagcagtagttgttaggtgttgggaatataggtaattttttaaaataatttactttattttctaatttttcctctgggtatgtattatgcacaccaatggagacacacataatacactgttatcaggacattattatagggaacatttgaaaaaattaaagtgaaagtatttaaccataattccacaaaggtaatgtaacagctattttgaatatacattttgacacagttataatcataaacctgtgcacagaaacaagaatgaacaagataagaggagagtatatgtctttggatggtggggatatgattttttttcctccacttttctgtattttccaagtgtgtgataatgagttcaaattatgttcacaatgaaaatgtgatcataaactttttagtaacactaccataaagaacattcaagaaatttaagaaaataatgctcaactataagcctacaacaacaacaccacaacagcttttgactataagcatatatatttttaaacagttataatgaactgtttaaatgaactgttaaatgaacagcatataaatgaactgttgagttataactgtagtataaatatactttcgtgtcctgctttctccacttaatgttctgtaaatatatttccacgttgctacataactcgtgattatcatttttaaacagttgcattaagtgtccacagataggtttaaacaatcattctcttgtttaccatttgttactaccttttcactagctgaaggttggaacggacaccctgacttacagcaagttgctttctgaaaaggggctaccactgccaacaatgttaacaccaagtaatgtacccacaaagttcaccccgacatcaacactgattctcgtttcaagagtccttttcccatgtagtaaacctcactgcccctcagctttcccgatgtccgttccaacctcagtccttcctatgcagccagccctcacctacaccataccatcaaaaactccttttccaaactgctcaggacaccccgctcaattcattctcagaaacctggccttctacagttcttgcctctggtgttttcttctgtctgtctcctctcccctcctagatctggtgatatattaggactcccttctttgactcactcatttctgcttcttgctctcagctctacaatcttcctaaactttgacactccctgcatctttgacatacttccaagccctaatcctgcagatccagaagagtaagattcagacacatttcccccagtgggtactttaattttgcttgttcaaatgatctacacttacattttgcaaatctttttttttaaattttttaaattttatattttttttccagccaactcaaggccaaaaaaaatttcttaatatagttattatgcgaggggaggggaagcaaaggagcacaggtagtccacagaataggacacaagaaacctcaagctgtgaggtcaatttgtaattaaaagaatactaagattagatgaacacaacactcagaaatactctaggagagctgaaaaagaaggaacagatgttaacaaaacaaattaaggctgctggggaacctgagtccatgttaagcttgggttgactgtaaagaatttttttttttttaatgcaagttagacatggagttagagggtcagataaataacgaagagaattaagttagcgatagaaagatctaaggatactagctcctgggcacctagggtgcaaactgacttgtggcagcataagctgatgctgcacaggggacccaagccatgttgctacttgtcacttaaggcaggaagcgcacaaaggaagtgatgaaaggttattagcctgcaacattatttacagcatgagagcctctcctacggttctcaaccttcattaggcactactgtgatctagtgatggttgtaacccattctttaaaggcaaagatgtaagatttacagggaaaagcttcgggttttatcaattcactatcatcaaacacatattgagttggttaaaaaaaaaaaaaacccagaacacaaatgtgtaatatttttgcatgagaaccacttcaacaaacataacatgtggcaaccaatcaatctgggtcacaaaaagccaatccgtatattgtaaagccttacacagtattaggttccaaagtgttggcgcagatgaaatggctgcagaaagaagctaaagtacttatcttttcaaacagtaaggagtaaaagccatgttatctatcatgcctacagcttcacaagactatttaagggtaagaaacaaaacaattactcaaaaagatattgacagggttcaaataatgcacaataaatctttctcaggatctaagacacttaaaaatataatcaaatttgttgctctcttcctcctccaaaaaaaaaaaaaattcaaagaataccaggtaaggtacctctgcagagtaaactgtaactgtatatcatataaatccaaatatatgtgatcactgttctgtcataatttgctattttatatacacctcatgaaacactatatatacgttacacaagtgtcatttacagttgatttgggcaaactctgtagtctggaatactcatagggttttctcaatctgattacttggaaaggtaagatgtgtgctatggctttcccacatgcagacactgacatctgaaggggaaagcttaagactgtggaatctgcacattcggtctcttttcaatctgagtttagagatgttaagtcaggtgtgtaacacactaaggttaagtctcctactgacattatcatggattggtttggattctctgtggtttggtaagggtcaagtcctaggtgaaggttttctaacctttaccccatgccctcagccagtgtgggtattctggtgtctggcgagggacaggcggtcattgaagagctgcccacagacgtcacatttgaagtacttctcatcagcttgattggcaccacctgtgctggtgctggcacgttcgatgtagcctgagcactccccaaaggcatttgcaggctcaaatatgatcatgctggcatgagttttcaggtgttcactgaatgctgtgctggaagtgaaggtttctgtgcattcatggcagtcatagtatggttcttctacctgaatctcttgatcttcaccttcttctgggtcttcaattcccacaccgtcaggctcgtcggcatctccctctggctcttcagcttttccctctggctcttcagctctttcttctgggtcttcaatacctgcaccatctggctcatcagcatccccatttggctgctcggcctctccatttggctgtccagcctctccaatgggctctgcagcctctccatctggcccttcagcctctccgtttggctcagcagcctccacttctggctcagcagcctccacttctggctcggcagcctccacttctggctcagcagcctctacgtttaagccctgaatcctcagaactacttgtggaacatggacattggcttcaacttcctgggctgctgctgctgcagctgctgctgcttcatcttcttcttcttcttccagatgaagctccttatgtttagtgaggactgtgctatgaataaaggacttaccacaatccttgcattcatagaatggtatagctcctttgaggggctcagtaagaaatgaggtgtgagtataggaggacccgtactcatagggctcattcttatgaacagttacgtgatctgcaagttctgctgggttgacgaaagattctccacagactgcacattcaaagagtctctcttcggtctgacttctctgaaactcagtgagggctaagcctggaatgatagcttcctcagccatctggctctgctccagtaaatcatcttccctatgaagtctcatatgctcattaagggcagagctatgaatgaagccttgtccacacaaaaggcatcgaatggccgacccagcaagagcaggattcctctctgcagcacgattcctccgtggcttcatgggcaagagggcaataaaaccatcatcacaccccttcatggaatacaactggtcttgttcatggattctctgatgctcgaaaaggaatgagctatgaataaaagattccccacactttggacattcatacagctgctctccagtgtaatctctctgatactcgctgatggaatgggtgtgaattacagaatgtgtgtactcccgactgtcaaccaggcacttcctgctgtggactttctgatggtctgtgaggtctgtgagatccacaaagcccaggccacagtcctcacattcatagattttgtcatcagggtcatccttctgagggtcttccatgtctgagccttgaatgacagggtcttcaattgtctcctgaccatgggtctcctcgctgtgggtctcctccccatcagtattctcgccttgagactcctcgccatgagacttctcttggtcatagattttctggtttgtgttgaggtcttcgctggtagcaaaaaattgtctgaagtccttacatttgttccgcgcttgctctttagcatactgctcttgggcgtaacttgtttgagggtcagtaggggccaagctgcgaatgacagaccattcatagtttctgcttccagagggcttctccctatcatgaatcttctggtgctcagtgaggtcagagctatgagcaaagcactccccacactcctgacattcatagagcatccctcgagggcgaaatgtttgttcaccaaaaggcagagagtgaattacagaggtctcattgctcctatgctcaatgtatttctttttagcacgagccttctggtattcacggacatttgagctgggaacagagaattcgccatccttcttaaactcaccagatccctctccaggaacacttttctgaggtttggcacggaatacactctgtatgacagagtcttcatagttgcgattcttactgcccccttcacaagggttctctctggcaggaatcttctgtcgcttatcattaaggtctgagatataaatggaggattctcccttctcattagattccaccaattcatttccattgtgacttcttggaggtttggaagccactaagctatggataacagacctactgtattcccttccttcagaggtgttccctccagcacgaactctctgatggttgatagcatcgaagctctgaatggtagactctgccattacttttggtttactgggccctgctacactgtgacttttctgagcttccacagaggctaagctatgaataacagacctctcatatgattttgcctcatagacattttccttagtgggaatcttctggttttcataggggttagagctaatggtgaacgccttttcgtcctcatcactttcaagaggtcttgttatagtatgactcttctgagattcagtgaatggcccactatgaatgacagatttctcataccctctgccttcaaagaggttctttcgagaatgaattttctgatgctcactgagctctgagctttgcatgaaggcatcccggccatctgtaaagtcacagagcttctccttattgtaagttttctgacgccttttaagggactgaccaggaataaaggtttcctcacacactttacccttgttttcaaatgggttccctctagtatggattttctgatgttctttcagggatgagctatgaaggaaagtctccccacacaccttacattcgtacattttctctttaccatacattttctgaaactcattaagggctgggctgggcctaaaggtttccccgcgctcacgttcacgttcacgttcatgttcacgctcattatctttgtcatccccaaagtggattttctggtgctcaatcagggcagaactatgaaggaaggtttccttacacaccctgcactcgtagaatttgtctttgccatatattttctgaagctcactaaaggtggggctaggcatgaaggcttcctcacattcctgattcttacattccacaagataacctctagcatgaatcttccgatgttcagccaaggcggcactcttattgaaggtctctccacagtccttacattcaaaacgtttccctccaacctgacttttctgaacttcactgacagccacactgtggataaaggactcaccatactcatagaggttctctctagtatgcatgatctggtgctcaacaaattctgagatgacactgaacgacctcccacactcatcacatacatatggcattgccccaaaatcaattggctgtgactcggtaaaggagggggagctgaggctgctcaggctgctcacgctcatggcttttctcatctcactaccacattcaaagggcttcttcctgggacagcctttttgatcgtgaatcgagcccttcccatctgtgtcaaaatgatagcgcctctttctttcaagaactctctttctggaaacaagggttgaattaaacctaaagcctcccctaaatgcattcccttcataaacccgctgctggatcactgactccctcttgttcaatgaaatgtccttccagttatcatctgacattctggggaatctctgtgaccggtcgcttgactcccttgctcttcccgatttggaactgcgtgacacatccttgatgaatttttccattatcactccgtgggaagattcatcttcacaaatcccccgccggtgggttgattttttggcttcaggcatagtttttagacctggaaagaaaccccaaatgtaaatactccctagtccccataagaaggacagtgggacttggaggggtgcacccttctgtgatgtttaggaatgcaaagtgtagaagttccttgatagcatctcactggttgtgtggctcctctgtgggatgtgcctcctgcttacctcgactggtgcttgggtaggcacttctcttggatcttgatgagtggccctgcgtcatgtgggagtggccatcgtcttcagcaagctgcactcctggtcacaaggacaatatgatgcctcaaattcaagttgaggaccaagactcatcaccataaattgatcttcatctttcactgagccactaaatatgaggtggcccacatctgattccttggatgtcagaagacatttgctgtctcatttccctactatctattccctaatccattctaatctacatgtaattcttctgactccactcagaaatgtgtacaaagaccccacatgtccctgaaatcagtgcattgtcttttagtcttcaccttcttgtaaccactttttaagtcctcttttccactggccttcttcctcttacctcgcgactgctcttcctccacccactcccttgaggccccatggccttacagacctgcagcacagccaactgcccactaccaacttgggctagatgtcttccaggaaagtccacatgggaactcaggatcccatcctgaatgtctacttaaaaacctccagtgctaccactctggaaaaaagtatcaactcttgtggcaagaagcatctccctgcttgtccccaccctgtacaatgtatctttacccaaagccagaggcatttcttaaaaacacaaattttatcatttactccctcatttgaaatctttcaaagatttcttattacccttgaagtccaaatatattaatgtggactctaacatccagcttaaaaaggagcaagatgacaaaatgctccaatgactggactgggagtgactgagagaagcagctgcttaccgagggagagcagcttcctgtagttttccatgttgtcctggattgtgttgtgaggtttcctgtcctcagcgaggtccaccacattttggtatgattcagcatcctaaaacagcaaacacagacctctcaatggagtctgtccccaccgatgttcaaagacagaataatgttggcaacatgggagttacatatatgaagttatataggaagtgctcacggtattggggttctgagtgatccaagtcaagtgttactagggacctacgtcgtacctaccttggtgctacactctgaggcagatcccaaagacgcatgacacatattccttgccctcatgcagcttataatttggttggagagaaaagactcatgaaacaattagagaacaataaacaataaatcggggtacagatagtaagtgctaaacgggttttgtagagggacagttcagggtgggcctgaacagtgtgcaaaggtttgtggagggcaggtggggccttaagtggtaagtgagattatgacacatatagaaagggattggtgggaaaacttagactaaatatcaaacaggcacggagtactcagggaacagaaagaagacacacacattcaggaagacatctggtcaggatgtgacttaaacctccctcccggtttctccatggcatagcatggctacattgagggagtctccagtttgcacaatttccaaatcacccaggaataactgtaagccctgagggcatttttataattgccttttctgtcttaatggatatttacctaaaaaggaattttaaaattcctcacattactgaggagaaccttctaccaggattctaaaggacctttgcttattgccagagggctgactagaactggtttcagggagtcatggtcccaggaagaatggcactgaggctggagagagacttgaggagggagatggtgctgtgggaagcccacaggctttggagctggacagagatctgggtcaaagaaggattgcaccaattatgagctatgcagccttgggaacggaaatctttttgaacctttctttcaggttcttcacctgtaaaatggggagaagagtatctatctgctttgcaatactgtgggtgaggattttctgcagtgtgatgtcttgcttaaatattaagaaaattatgtaaaggaaatacaaatgtcttgatattaaatctaccatagttctattgctgggaagaggcatggagcaacatgaaaaatgtagcaaaaaaaagaggacttgctgagtaagcaaagacaaagaggtacgggtatctgggtttaagagggaagccttatccatgaactgcctgtgtcctgccacaaaaaagcagaaacaacaacaaaaactaagtagggcaaggaaacacagcagagcttcacagataaaattcttttttcacatgaaagaaaaagcacgctttgattgaaaattaaaatctaggccagtgggcagccctaaattggttgttcgctttgtgtttgtaatcaacaatgacatcttaatgcatacaaactgcaatcaagttcaatggaagagatgctgttctgaaaacaatgctagtatggctcaatgtagttttcacaacatgatctatacatgtgaacaattaagaaatttacacatgaagctaaaagatgagagaattttctgttgtgtacaccttcaaaatgtaatttgtgtcatttgctgctggtgttaccaccatactgagtcagtaggaatcagtagcttccagacttttaattatgcagacatggggctcggatgccaattcttcacacattgtcaaggaagggcatttaaaaagcaaaacaagacaaagcccaactaccaagacaccagtggccaggcccacacatgcctccagccttcttcctatatcccagccacctggcccttggtttggttcccatcccacaactttagctgagctctccctaatgcctggggtcccctcccccaacacctgacccggcgtgctcctggctctaaatggcaactgttaatgcctccaagacatttcccttcaatccaaatcaaggcccttgttacaatttcttgttaactctctatttttccttgaggacactgagaatgatgagcagttatatacaacatttgtgtcaatacttatttgtgcaactgtcaaaagcttctcagggcagggcccctctctgtgttgctcactgctgtgccccccagggcctaggcctgctttctgacatgggatgggtactgatatgtgaaggaaaggaaggctcagcccaatggcttctcccttctttgagtccagtcagtgctggggtcctcctccacactccaccatgtataagtgacccctctcctccttcctaaaaaacaagctcaagttccacattttttttcccttcatgaatctccccggcacatgctgcctcttaaaccacaactgccataattgttaacatttaacggtgtgcctaccatgtgccaggtactttatgtatgtgtgtgagtgacttttcacagcagccctgggagcaatcaccatattcattttacagatgaggaaacttaaattcagcttatgagtaaatggcccaaggccacacagctagcaagtggcagagccaggctttaaacccagctcctgtcagctccagagcctttgtgctccctggccagtctactctgcagacccacagctttcctggctccctcctgaggaccagaaacatctccagagtcactctgcttccctggccctgtagggaacggccaatgtgaccaacctaccaagtgacacacatgctgagggggcaggagctcctctgaccacatgaacgacaaagaaacagccagcagcaacctgggctacttgtcacctaagggatgggcccgggctcctcctggagcgctgggactctcaccccagctggactctagggggcagataaacacaccatctggggaaagaaaggcgtctctgccatgaaatgaagatggcctttctagaaagagaggaaacctgagcatacctgagatcgggactcataagccctggagtccctgtcgtcctctctgtccatttcaaagcttgttttcgccaccacaggaagggaaagatcccgcggaggcatccctgggaagaaaaaaggcatcaacaagaagcagggcccagtccatcctgcaggtcccaggtttgtcccactcaactatgaagccagctggggtgtgagtgtatgagagcaagtgcctttctcttctctgcattctgtggcagcctctgaggagtcccataaaaccagtggccctacaacaacccagacccagggcagggccaggggccctgcctcatccttctgctcccagtctcggaggtggttcagattgtgcccaagctgtgtgggtccaggtacagtgtccactagcctcatccttcgggcacaacctctgggtctccccagctgcaatgtgtgacagggagatggcatcagagaccgtcccacagggtcatggctctgaacaatgcctattgtgttgtgaaccgtcactaaatgtcactcactcctgatatccttctcctgatcaattttagggtgccctgctgcccacagcagtgttctccaagtccaggaagaagaggaaatgatttccagcagtatggacaccaacaatacactggtgtgatgattgattcccttccaaatctcaggcctggtgctcagatgtggcacttccctaacactgcaggaagtcatggcagacattcctagttaacaatattgttacaatgtgtttttcattctcgccttctgcctatggcacttcatactagttttcaatttttgcagtggcatagtctttcatacagaaacttccagtttttttttttttaatgcaccagcttaagaatactgagcaaatagtttaggtggcaacaggtctatgtggtgaaacctgtgctggtggtaccgagtggaacttcaaaaatacgagccttggactaaacttttggggaagcggaatatactccaaatggagcagcagaaacttcgaggccctggcactttccccttgaacctgtgcacagcacatgctctatatctcctactgggaaagaaagtggttaagactcactgcttcttgggttcctggtgtgggaccagcggtctcgtggctccatgtctctgcttctgcccctccggtcccagtcccggtcacctaagcaggtgagacattccagtggttaacaaagctctttgacacacctgttttccctgcatgtgcacaaacacccctctggaaagagatgctaccctcttcccacaaggagatggatccaaaacagagagctccaggttcccaggctcatctggccccttctttatcatatacccgcaacatggtttctgcaggctttgcccaagtggggcttgcttccaagcaagttccaaagctcagtccagtagctaacccccacttcagactctttgctggcttcccagttcctaaggggctgagtccacattcaggagaatggactgcagaccccctactgtctggcagccgatcttaaagtacacgttattctactacaaaaaaaacaaaacccaagaaaacaacacacacaccctccctgaaagcagtgctccctataaaagctcactgaagcatctttaatgaaccttcctgaggaggctgggggtacagctggaagcagcctgttgcaaattccaaatagctttatatactttatcgttgaataaaacggtattaagtatttaaggtgtctgtttagatataaaaatgtctcattatgacatcaattaatttaccctctcctcagatctctgagtgaagctgaccactcggggatggcgggtcatcttcatggaggccccaacccactgtgtctccatctggaagcatctggcagcgcctgcccatgggtgaccagtggggatgggtactcaccactgaaagaatggactgagtgaggtggtgaggactctcttctgttccgggtcatgtcgtcgtcgctggtcacgtcactgttgttgtcgtctaagaggacaccggtcgccaagttactatctctggcccacattctcacaatagttccccccaatccctgagccgcatctccctgtcacagacacacatggttggaatgacctgatcctgacatttctgagttcaaaacccttcagcggcttccaaccactcctggcatactaaaaactgggtggggggagcatggtggctgtgaccaccccgacctcacccccagacacaaacagccagaaggcaacctcctagcacaccacaccaaaaaggcaggagccataggaggttttctcccttctacagaagtgtctcctttccctctcctgactcaggatggtggttctgcactagggaggttttggcgaccaggggatacctgggcatgtgtggagacacttttggtggccacacccagaaaatcatgatgcagctcaatatcccacagtacacaggacatccccaccgctgcccaggacagagagttatccagtccagaccatgtcagaagtgtggaggctgagagccccaggggacacctgaggcctgcactgaccaccaacaccccgtggagactctcaccttctggttggtacatctccttgtaattctccagcagagtgacgagcttctcacagttctccggcttttttgctcgcacccaaggcttgagcttttcagggatgatggtcaggtactgctcaaggaccaagagctcgatgatctcctccttggtgcgggtctccggctgcaaccaatcgaggcagaggtttcggagtttgatcagggtcttccgaggcccaacaaattccacatagattaggttccgaaacctctgatgaaaaaactcagagtcagttggaccttctcctatgatgacatccggctccttagtcaagtcactgtctagctcatacagatttggggcccaggacttcttaggtttggtggcagacaagtgctttggaggcagcatttctctaagtaaaattttcactggaggaaccaaacatgagtcaacaggaaagacgcggcagcctgtgaccgtcagtactcagggacctgtggatcgtaaggagatatacacatgtcccagaagttgaagaccaggcagcagtggaggccaccttaccagaggcatcgacaatgcttttgggatatgggagtccccagtaaataggcaaacaaccgcacaaagttggcctcagcacagcagttacaagcatgacctctgggcttcacagagacctactcgaggagttagctcggctactaacttgggctactaacttgggactgtgggcaacttgtctaatgccctagaagtctctctgtaatctgagaaataagaataacagcacctccatccctttcagaattgtgaagcttaaataaactaagatacctaaaaagacttaactgcccaatgcaaggcacaagagaaatgttcaaggccctagccagtactaaaatcagacgtcagcacgtttattagcaaaaatgaaaaggggaagtaggagttggggcaaatcctcccctaacatttcttcccttaacacaattattaaaacacagtatacaacatgtaaaaaatggaagaccattcaaaaatattaaaagtactcaactctaggtaatatgacattattccctcacacagtgagaagtgaccattgagcctcttgatgctactgcacgttcttttgccttcatcaatcttgacaaaggtctaatctgtctaaaagaaccggctttctgttttgacattcctttcttactgtttctttacttagttcatttatttccttctctttattttattatctgcccccttccattttttaaacttttgagattggacataaatgtaaagattttcaatctctccttttttttatgtaaccaagtaaagctatacatttccttaaagcatttttgctattatttgcattttattgcgtattttaatgactggtcagcacatctggtgcaactaagtaaggcaatatgggaaagaaatctaggtctgggagcataaactacctactggctttacttccagagaagaaaaaaaaccatatgcaacagaaattttctccctttgttttaaaaggaaagcaagtttaaattttttaatttggaaaaagtctaaaggaaaactgaaggtgtttccattattcagagtctctcattagacattatcacttgcaaatcaatgtggtaatcacggtaaactcatgtttactcgtctcagtgatgggctcccacttccctccctatgcaaactgccctcccacgctctctcctgcatattatcatcccatggagcttgggcaccatccaatgcaaatgcctcgatcctgaagaccttagcgactggactatttccttgctgccttccttcataggactgagaaaccacggagagcacaacatagataatgctctgctgggcagaagaatcccaaagcaagggaaggcaacagaccagagagtccaggctccagatgattggtgtgacatttcagacatggtcactctaacccaggacagggcaagagcagaggtctgtgcctgtgagggagacaggcaagggcagacggcccaactctgttatgtggcagacagactcaggagaacactctggtacctgaaatgatactagccctcatcctcaggcaacaagataccctcagatatgtaatcacctgtctgggaacaggatcctttctggaacttcagaccaagcagctatccacaggaacagagtcaaaacacaggtatctgcagaagttttaaaggaagaaatacacagactaagaatatgaaagacatgtagaaggagtgtcagagaattaactccccaaacaactggggactcaaatagcactggggtgatgccttctataccttcggggaaaggccattcccatgctatataaaccatgccagacaggagaaataaaaagctttcaaactgtctttatgaaaccagaacaagtcaaaaacgcaagacaaagatatcactaagaaaccacgaaccaaaactcatgaaagcagaaataaaagtcttaatgctgctattattgaacattattctatgcagttctactcaattacaataagacaagaaaaacacatctgaggcacagagagataaaactaacattcccttatgtaagatctatacacatatatatgcttctattctgtgaatttctctccctaacagacatgaattgaagcataaagtaccctaggtgaaagctatatatcagaatggcaggcttatagagttcaataggaaaccaataatttttttaaagaaaatacaaatagcccaacctgactcaagaagcagagaaaaatatgaccactagggaagaaatctaaaaagctgaaataatgtaaagagcaacttcccaagtaaactttctgtgaataaaatatttaccgtgttataaaaaccattccagagcacagaaaagagatggaggacttcctacaattaattttgtgaccacttgaatgcccatatgtatcttgtcacaaggtggatgccaacttctgtgccaaaaaaaataaaacacattgcttttcctcaagaaattcaggattaaacatacacaatcttcccttaacatgctcaagattttctgaccaggccaatagaacttggcccttggtcaatagaagccattgaaaaatggaagttatttttttaacagaaaaaccttaaaaaaaaaaatcagatctgagctacttcccaccatggcagaggaaactcatttgggagtaaagaaaggctttggaaacaaaacaatcaatcataaagccgggcaacatatgtttgtatgcacgggaagaaacaagtacactcatatactgcctgtggcaatgcaaattttatcaaaattaaaagtgcacatatcctcctctcctacaaattctacttctatgaatttacctcagagatatgtaatgacctatgtgcaagaatatattcattgaagtgttgttaatagacaagatatgttatgtttgtataatgaattactatgaaaccctttaaaataaggcaactctaaataaatgagtatgaaatgatctccaagatagttaagtgcaaaaccggacacagcactgtatacagcattctcagaaactaaaaaaagatgtgcttagacagatgatttctagaaggatatataagagactattaatgatgactaatcgcaattgcctctggggaagggaactaggggtcaggaaagggagggcaacttactttttcattgtatattctccttttgttttttgtttttatttttattttaccatgagcatgtattacctagtcaaaaaaataaattcaaagttaaaacaaaacaataaacaaaactaccagtagaggcctttagaggttgtgctactcacagagcaggtgcaggcagccgtaacatctttacactgatgctgagcccaggctctccccgcatcgcctccctatcaccatccacagcttgaatccatagtcataccctaacctggccattagcaggtacatgaaagtcaatttagaaaaccctaaagaatcaactttgaaacctgttagacccaataaatacttatgatattgcagttgcaatctgaatatacccctcaattacacccaacaactgtcagtacataaatacaatgccatcccctatcttggcaattccacttctgaaatctaactcacagacccatctgcccatgtgcacaaagatatacagttcaaaagtgtgttcacagaagcactgtttacaacagcagagaacagggacagtcaaacaaatgctcaagcgtaattccaatggcagagaccactgaaaggccaccacgtgggagacaggaaaataaagatgggtccaacttttctgcactataaaaaccaaccaaaataaaaaccaagcaaaaagggagggggaaaagtattttataacacagatgacagttaatgtttgaaatgtaaaaggcttttggcattaggaaaaatagcccaatatgaaaataaacaacactaatacacagagttcctaaaattagtgataataaaggccggttacttaacatcaaaaatcaaagaaatgtaaaatattacaataaaccttttttgacctgtcgaatgggcaaatgtttaaaagatgaaaattgatgctagtgagggtgtagagaagctagctggtgcaggcatgaaccacatttctggatcccattttggccactgtttaaagatactaaaaaaaacacctacttcttttgaaccagcaattctccatttaagaacaaatatagccaagtagataaaatgataataagaaaaaaaagctaaaaagtcagctgcagctgggcgcagtggctcacgcctgtaatcccagcactttgggaggccgaggcgggtagattacctgaggtcaggagttcgagaccagcctggccaacgtggtgaaactccatctctactaaaaatacaaaaattagctgggcgtggtggcagtaatcccagctactcaggaggctgaggcaggagaatcacttggacccaggaggcagaggttgcagtgagccaaaatcgcaccactgcgctccagcctgggcaacagagcgagactccatctcaaaaaaaaaaaaaaaaaagtcagctgcacactatggtttaacctttgtatgtacagctaatttctggtttgtaaaaggtaaaaccttgaacacaaaataatggcaggtaacacattttacacatggaatggtgggaagggacgagcaccactgacagggaaacgtgttctgttgtgttactgctatgtaaccacagtcctaacacaagtcacattagagcaacccagagccaaaggcaggaagaggaagtgctggtcaaccttctcctgcagggctacctgacacaaggtgggccatatgcaatgaggttagctgccttcctggccgagtggcccaacccttagccttggattcaacccgtcctctacttgctgcccaaagggcaactagcagtggggccagatgctgaaatttgcacctgccagggccacatacttacctcaccctgactggggaagaccagatcccacgtgaccttctgtgacagcgagtctggccaatcaaaagcataactgctctgcccacttggcccccacttccccaggccagcttctccatggcaacagccacgcctaccactgaagaaaacagaagatacgtgtttgcaggtgctgagaggaagaaaggtctaaaggcttgcctgatgctatcaaatgaaatattaaagctgaggagttaatctgcctgaggatggcctaaacgggccatcaataaaaacgtagcttattaatcagagctgtgcttgaagatgtatgaatccaacagaacaacagagcacctgtatttataccctaccgcaaggctccatgggcaaagactctgttacctttttcatctctatatttttataggtgttcaataaacattatttgcatatagatgcaaaaacatttaataaacccaaactaacaaagtccaaataatagcccatgatcttgaaaggctattccaggaatacaaggaggatgtcccatcagggtaaactgttacataaaggatgaaaggggaaggggagcccacaagcagtatttcaagttaaaaaacatttgcaaacttcaacagcctttcctcataaattcttagcagagtaaaagcaggagaccatctaagcattataaagacttatctcaaatacatgcaaacaagcatgttattaaacattaaagatgttcctctggaagtggggacaaggaagggacagctataccacaactacaatttaacatgaccctggaagtcctagctagtgcaactgaagaaaaagaaaagtataaatatggggcaagcattattttgaactacaaaaccttatgagtaaatacagcaagagaaataattcccattaatagcaaaacaaataaataaatctccataaataaatttaacaaagttacctgcaacttcaaacaaaatttcaaaaatttacagaaggaacacaaaaattagccgggtgtggtggcatgagcctgtaatccaaactactcaagaggctgatgcaggggggccctgggaggtggagggggcagtgggctaagatcatgcccctgcattccagcctgggtgacagaactagactgaatcaccaaaaaaataaaaaacaataaaaaataaaataaaataaaataaatgacagaagggcaataagtctgaaataaatacataaagacacgtgtatcacatttaaaaagctcctttttattttgaggtggggagttttgacaaactgataatccagttcttctggaagaataaatgtacaagaatatcaagacaaccctgcataaggtctatttggagtgggaggtggtttgtctgtaaaatgactccaacacacaaaaataaagtgttttttccaatataaggatataagcactaggacaaatataccactgggacataacagagtccagaattcaactgtgtaaaagtctatagacacatggggacttaatttataataaaggactggaaatggattccttatttaaatataaactaggaactttcttacagctaaatggcaaaggataactttaacaaaaaggccatgacaggaccgctaatacctcagtgtttggttactcaagcatgcatttctagaattagggttggcctttgacgttaggaaaggccaatataaccactgctggcatggagcctcccctaagaaattaggtatttcagctacacatctctggaaggctaaggccactagggccagtgacaaacatactttgttctaagtaagttactgcatccaaaaatcagcatctctcctgagttttcattaaacaaggaatgaaaacaaagtatttagcaaaatgttacataaccattaagtcgtgttgtcaaggaatgttacagctttattttctgattataaaaataaaacacagcactacatgcaggtattgcaaaacattcaccatagaaactgcaagccacacccactggttaactttgttgctattaataaatcttaaaatctatacttatgttgttcttactgcaaatattcccatttacgtgtacacagagaatgagaatgtccacacaatggaatataatgcagttttcagaaagcaaagctatagatggagaccttgagtgtgaactgtttaataaatggcatgatctcatgtatgtaaaaaataatcaaacatatggcagtacatacaaactaaactggaagaaaactcacataaacttgtattaagactattcataaaatagaggaaatctatcagaataaatgattaataataacaagtctctgtttctttttccatctctatttaaaatgttattttaacttcgcaatcaggaaaaaaactgaatataaaaatgtaagtaaatgcaattactgtttcctagcgtgtttgttttccttcctgcccagcttgttacagcacatcaggccctgccctttctctgctgggttccccataatacaatctccctctgacccttaagcactcccaccgacagtaccctgtggtcaccatctgtacctcccctctccagtgactgtaccacagagggggctaacacgcatcaagctccacacccaaatcctcacttcattgacagctgtctagccgtcatatggctcaagactgaactctggcccacagggcaaacccatatccttcctggcttgaaggtgggctcccacacacccctcattactaaagcttccatatctccctctgctctctcttcagagcaggactcagtgttaagtagtagccaacagcagttaggggcacacaagggctagctgactctgggccaggggacaaagaaaggtcaccaacttcaaggggagggaggagaggcgccaagtgatggggccactaataaaggatccctctacacagccaggcaggaagggtgcttctgggagtctggcgttctttgatctccaaaggatgttttctttacactagatgtctaaacatgaaacctctctgtatacagaacaagcctggcgctgcctgctgcatgacagcattgccattgaagtctggatggtggtactgatgccattctttggatattttatgacactttacttctattccattaaaatgagtaggaaataaaagcatggctcttacaattaatataacacataataaagatgaaactcatcaggcatccttgccagaagtcagggaagatccatggctttaatcagagaaatgatgggtcagtgttcaactgagcagggaagaacttaatgaaagaacacatcatgcactagaaagcgtctgggaccatgtgtgagaagaaatcctgtgactccggtttggcctcaggctcccacatcccatctgatgcaggagaaaatccaccgagtctccttcagtcccatttctatttacttactttggtccctcaccatggtgcacctagattcagccccctaactcgttctacctacctcattaaaagggggctggaattgagaactttaaagtcaggaaccgaggaggttactctcttcgtctcccagggacagcgtggtgtgtggtctcgtctctcttcttgtttgctccattctcctgcctctctctgcagaccgacattctctacttcagcacgcacatggagtaagatgctgtcccagcccaggcctacgtcacctcccagtttaaatgcccgacactcagtgtcccttcatccaaattctcagtattaaagtgcatgctacagcctgattccttctagggcagtggttctcaaactcagatgtgcagaagagttgcctagggtgcttatgaaatacggagctacctttccaggtgggatgactcaggaggtctgtggttccccaggaaagaagcattcctacaatcactccaggagctgttctttgagaaccactgctctaaggtatccagtctggtccaatcacctatgaataaggtacatatgggacatagggactttagagggaaaattttatataggagcaaggagtaaatgaccaccaactccatctcacaggccacaacctccaccctctggtctgttggctggcttctctcagataatctcaacatcctgggcttatttctaccacattaagcttagcacttaccacactgcagcaaaatctccttgttgttgtccatccttgagagatttccccaaaagtttagaaagagaggaaataatatctaagagttcagtcttatgaccagcacaaaatggttcaagacaaataaagctactttaaagagacaaaatgtcttccagaacagtatgagttatttgactatattctaataacaataattggctcatctgatttttttaaggggagggagtactaaaaagtaggccacaaagcttggtccatccaaccatctacaggatagtgaacaactctcatcagacctaacttgaatggagtttggggaggacaagggtgttagataaggggcttccgatatcttggtaaccctaagcaagggtttcactgtgacaacatggctgtaccaggctatgtgacaaaccagcgctattaaagctcacccacatcctcttggttctgattccgtactcaccaagcaaccttctcattatggttgtgtttcccatgtaggtctgcctacagggagagaatttgctgatcatacacactgctgagtacttgggtccctgctattgtactcctaccatgaattaataaaccagaattgtgggaacaggaacatcctatttcaagtcacatgtcagtacggttttaagtctcctgagcttagttaaatgtggatctaccaacatgagccctcgggcaaaggaggtttccaagtctccacagggttaagcaccataatgcatatcttgagcactgaggccaggaatacaccaacccatcccaagggctcacctggtcatgtcagcttctccctaagcagtattccaccaccaccatagccacctatcttggtaaacacattcttactcttcttgtgatgggagtttccattcagtagacactgaggccagggattatgtcattcacttctggagactctaagcctggcatgatcctgtcctggatcaggcccagtatcaatgcttgctaacaaatgaacaaacagacaacctctagctatgtgcttgcttccccacatcatgtgactcactgtgcctcctctgaatcagtcagcaggccatgaacagagaaagtgaggagtctccctcctcaacacctctcaaataatctacccacttcactcctccctgtgatatgaccacaaaccaagccaccatctctcacccaggcccaagttggtctccccacacccactgcgtccaccctccccttctgcaccctgaaaccagatgatctttttaaaaccacaaatctgattatcatgatactcccatggttaaaagcacttcccgctgcacttaaggtcaagcccagttactcaccacagattacaagtcttttcacaatgaaaccacaacttaccttcttcctacctcaatcagatgccactcaacgattcccttgctctaggaatcctggattttcagctcctctctctgcatctctcaacaacaaccctatcccctctgctgagactactctccccatgacacacaccattcacactccttcagggctcagctttaatgttctttaccatctcagggaggcccctatgtggcctctctaagattaagtcagctgttgctagcagatgttctcttgcaaaagtataaatcaaacaattatgttttccacagctttaattcccaaatagactaaaaactctttgaaaacacttcctttcccccattggggctatgtcccagtacctggcacaaagtacacacttgatcaatattcacaaatgagtggatgaatctctcatgcttctttaatcaccaggcaagagaaaaagagtagccctgaaggagtagctgagtatgagaaaaagagggaggatactgaaatggatggtgtgaggccaaggagaatttttagagaatacacaatccaccagaagagtctgggtgttctcagagggcacaaatggtgctggggtggctatgtggaacacatatgcagtaggaaagtgtcagagtaaggaagtgcggtggtcactccaaagatgaatgtggcactgtgaggaggaaattcaactcacctggacccagccacctagcgtttggacctagtccctcttcctctcgccagtcgtctccaagaaggacggaagatcaagaaggcaaagctgtagaggaaaagaaaatgtgagacgccaagtttattttgcagttactgggttcctcaggggggaacaataccacaacagttccacatttatcttctatgatggcacaggtcaaatgagaccatgaaaagcatcccatccaggatgaatggccacgggtatagctcccttagaccacctcacaccctgggatgtactcatagactttctccaacaaggttacatcaaaggcattcaagtcaatttctggggtgtcttacaaccttctctggggctctagattaaggaatcaattcaagaaccccatttttggcgctggccgtccccatgttaggaccgctatcctatcgttattattaggtaatagtaccctttatcacgtaaaatattttagggtttatcaacatgttctcagtggactaataggacatagtccaagtcccactgcacctcagagtatgtgttcaatcaattagaggtccctgggggaaggaccttcatgattatgagactggtttatattccaagagtcaggtgggcatattttggtgaggttaaagagcttattaaaaactattcaaaggatgggcgcagtgactcgcgcctgtaatcccagcactttgggaggccaaggcgggcagatcacctgaggtcaggagttcgagaccaccctggccaaaatggcgaaacccctggtctactaaaaatataaaattagatgggcatggtggcgcgcgcctgtattcccagctactctgaagaggctggggtgggagaatcacttgaacccgggaggcagaggctgcagtgagccaagatcacgccaccacactccagcctgggtgagagggccagactctgtctcaaaaaaaaaaaaaaaaaaaaaaaaaaaaaaaaaattatgacaggctaggaaggaagcgtcatatgtgtcactttccctacctcaaacaaaacaaaagggctgacttaagatctccttgggtggagccagggctaggtaagtgagctctaggactccgtaggagagctagggctgggagggccacacccaaacgaactaagctttggaagctgggcagccctctagcggctctgctcatgaacagtttctccagaggccccaccctacctatggggcagcccctttaaacacacccccacctgcccagggcagcctcctagttcccatgcactgcccctctcaggaccacccgcagccctgaatttttccacctccagctgtacgattttgagtgaaaatccttcaccaacagagtctccaaatcacctagaccccaaatcttacacccacagcccacttcctccattttctcacttaaaatcccacctttccccaaatctcttaaaacgtctgagtttggccttggattccacttttctgctcactgacccaaggctgcacagctgaacccgcccgcttcccgaggcctggctttggcgccccctggaggaagtaaggcgccaccagccatgagggcacgctgcccaagatagcgggggtagggctcagctggcacgccagtgcagcccgcggtcactcaggaaggctccagtgcaggccccacccatgaaccggcaaagatggcacagaatgaatgaacacggctctacggccctgcctaccttgaaatcccctcagccccctccaacagccctgctgtcactcaagatggcgcctgcgcagtacacctctgctgcccccgccaccggccaacacacgtggtactaggatggacggggctcacgctcactcctacagcgcagctgtcattcagtaatggtgcctccgcactgcacccgccacattgaatgccggctgctctatcagacaagacacacatgctatggcccccctcagtcactcaagacaaagcagaccctccctcagaaccgcacctgcagccagcccagctgtcattcaggatggcacctgcacagtacaccgtggctgccacctaatggccagcaaagatgatgccacagagtgggcggggccatgcagaccccgtcagtcactcagtcctctgcacccggccctacagccaacccagcagtcattcaaaccagtgcctgtgtaactgccctcacgtgccccattacagccaaagattgcaccacagtggaccaggctcggcagcccctagtcactgagaaagccctccctcatgcccgcccctggggccgacccaggtgtcactcaagatggcgcctgcgcaatcaacctcgggcgccaccctgtggctagcacagacagtaccgtagaggcggtgaggggcagtggaggtgagggtgctctcagccctatcagtcccgaggaacggtcccgggccccagcccttagccccgccagcagggcgcctgcacaacccgcctcgcagctcccccactaagccgcccccatacacaagatggaaccacacgcatcctgtggtgaacaaagtcttggtcaggcaacaacaggggaaggggtgagcctctgccaccgttagccaaaaacacagcgagcgcggtgataacccgtcaccctgtccttaagcataaatggctccgcggccgctaaggcaaactctttaggcacgtctcccggctcccccagatgcggggactgagccagtcccactggcaaaacagcctggcgaccagcacacacagcccaaggagcgcggcactccacagctttccatcaccgcaaggcaggcaagcacagcaaccgtggccccgcccctccctgtggacaaccccacacctatgcggcaaaccgcagccgccccgatcaaagatggcacccaggtgggcggggcttgaacagaccgtcccgcccatgccacctgcagccacttcagccttgccccgccgcatctgccgccaaccaatccgggcaacgcctgcgcggcaaacctcagctgcccccatcaaagatggcgcccaggcgggcgggccttgtctcgcccaaccaactaggacagcgcctgcgcagcaaatctcaagcactttcattaaagatggcgcccaggtgggtggggcttgaacaaaccactaggtccaatgccaccctgtcacttcagccttgccccgccccatctgccaccaaccaaccaggacagcacctgcgcagcaaactccagcagcccccatcaaacatggcatctaggtgggcggggcctgagcagatcgtcatatccaatgctacacagtcacttcagccttgccccgccccctctgctaccaaccaaccagggcagcacctgcacagcaaacctcagcagcccccatcaaacatggcgtccaagcgggcagggcctgaacagatcgtcacatctaatgctacccagtcacttcagccttgccccgccccatatgccaccaaccaaccaggggagcacctgcgcagcaaacctcagcagcccccatcaaacatggcgtcaaagcgggcggggcctgagtggatagttacccaatcacttcagccttgccccgccccacttgccgccaatcaactagaacagcgcctactcggcaaacctcagccaccctcataaaagatggcacccaatgggtggggctggaacagaccattacatccaatgcaacccacagtcattcagctttgcctcgccccatctgccaccaatcaaccagaacagcgcctgcgcggcaaacctcagccaccctcataaaagatggcacccagtgggtggggcttgagcagacgattacgtccaatgccacccagtcacttgagccttgccccgccccatctgccgccaaccaaccaaggcagctcctgcgcagcaagcctcagccgcccttatttaagataccgcccgagagggcggggaaagaaaacccctacaggcaggacagcccttcgcccctcccaccaccactgcggcaaacaagccccgcccccagagggtagccgggcacgccggcgccgcgaggccgatggcaccccgcaggaaggggcattttcgcagcccccagacccagcccaggaggcccagggctcccgagagccgcattccgccgtggcaacagggatagcattggtgtcgaccttgctggacttgccgtggcagagcccccggctgtctgccctaatgcccccggtttgctgcggtggcccccggccagtcagaaaggcgcggagaccctgcagcagcccctcagaccccggactgcaagatggcggcaccaacgcagcagcccgggctgcgcccacccctgccccaaaaaggcaccaaccatccacagcctggccgccactgtgcccactctcggactgggcagcgggcggccaagtaccatgtccgccagcccgccctgccacaagggtcgctggcttgccgcggggtcttgggcttgcggcaagacggccactctggcccagagccgtcgcgacaccaaggtcccgcgggcaggaggcgcgcggggcggccgaaggcgcactcacctcacctcagtgctgcgcagcctcgggcacgaacagccgcctagcgcaccctcatggcgcccggcgcccggcggcgccaccagcccagggtggacatctcccgcgcctcccaaacctctcctcccgcagctgcccagacttctgcaccgaggtgcagctcgacgcctccttgtcagggcttctccgcagaggcggggcttctgtgctagccaatcagcagcctcaccgccctctccgggccccctcaccacagccctgtgacgtgccaatcaggctgcggttgccacagcaacagtttggcgcgaaggctgggggctgacgtcagggagtggccgtgagggaccccaaagccaggtctggaaaaggggggtgggttgggtggtgggggtgcagcccccaaagaaatgggggtcgaaatggaggaaaccccactgagatgctcaaatgtaaaaccgctgaagaataaagggacaaatgtacacatctgtctaaatgaaaaaaatgaaaatcctggccgcaaaaacacatacattaacgtctaaagacctgcagggaagacaagacttttccgcctgggacacatgaaagacatcgagctaatttccttaataaatgaagagctcttggaaaccaacgagataaagaccaaaccaagacagaaaaatgggcaaaagggataaaactggcaattcgcaagaaaatccaaacggctggccgacctgcgaaggaaacatcacgacctgtttgcataaagaaatgcaaacctgaaacaccgggcacgtgcggtttaggggagcgggcagtctcacacactactgagttgtttcccagcagccgtcaatacagaccttccactgcgtaagcccactgcattgccatttaataaaacagcaagaaaatgagagagaaaaataatgaggtagaattgtatgggattattaaggattgaattctcagtagatttagtgaaatatacaagttactgaagtttgtagaaacgaactggtaagtgttttctcatttatttgttttttaaggataaacccaaatataggtaaaactgttggaaaggtaggcaagaaattgttgatgagttacttctagggacaaggaatgtggggtggaagagggatttttcccttctgccatccatactgtgaatttccttggcagaaatacgtatttcttctctggcagtaaaatcaatgaattactaaaagttcactaatgtactctttggtccaactattccactctcaaggaactaaaaaagcaaaggaaatacagggatatacagaagattctatacagggatattcacggagcatcatttttatcaccaaaaatgtgctccacagaaaagaattaaactgtattctggtaaatttacacagcgcgattttaactgactaataaaaatgctgtatgattttaactttaaaggaaaaaatctgtaagatgtggttaattaccaaaaggtgtttacctaaggagcacacagactttaataccccaaattaaactttatattatactcaaggagttatcagtggttgcttgctacactgagaagctgctttatgtgttttagactccctagaccatcaacagtctctttttgcccagcagtgccacataaacataatatacgaatgaaaacactgtgcttcttatgaaaatacacgttcaaaacaaattccccagcaggaatattgaaggtgaatgtggtagtaccctgacttaggttacagattttcaaatctggctactctcattaggctcacctggagagctgttaaacaatgcagattcccagtgtcccacagagatctttgtttttcaggttcccaagggatcctaatgtctagttaaggttttgtaggtgattttaatatattttaaagactccatcatccccctgtctcctcaaaggcctctatctgcaataccagtttctctccggatcctgaatcattaatttccacaagacaccacatgctctcagagctcctgcagttaccacccccttgctcagcacctcttggccctgaaaatgcctcttgatagagcagtctactgtcactaactcaatggttttaccatacattctctcctgctaacatatatgccccacaggcttccatcccttccaaacccactgaaattgcttgacaatttcagcaattccttatgtggccaagaaacttgctcttaatctcactttatctctcagtaatattcaacatcctcattaaaacaagcaaacaaaaacaaaatcccatgcatgctatcttatttttggtgacaattacatggtcctggtttccgctcccctgccatcagtggtctcttctcagtcataaatggcttctgctctgcttgccatctacacgctggagggtcttgcctcagaacttagtcactagtcttctccatcaatgtccactccctaggtaacaacccttccctcctcacctagtcacataatttaaatgccacctacatgccaatggctcccaaattccaatcctctgccacaggactgtccacaaaagcgcagtcttttgcttagaaactgactgctccccttggatgtctatcaggcaactcaaagcattttaaacaaatattaatttcccctttccccatttctataaacagtaccagttgctgaagccaaaaaacaaaaacaaaaaacgacaaaaaaaaccctcacgattgttctcgttccttttttccttaccaccaacatccaatttatcagcaagtcttgctgaccctatctaaggcaaatcccaaatttgtcccatgatttccctttccatggtagtcctaagaaacattatcttcctacaaaaacccttcttccattccaaacccttcctccagtattctccacacagtattaagggtgatcttgcaaagcaaaaaagatgtcaatgttccagcttgaatgacctcctgcccccatcccaattgcatttaaagtccaaaagcccaaaattagaagagccaacattatcttttgtcttagaggacaattaaatataggtgttgtaaaatttcacaatctcttccttcaatgcctaatttaagaaattcttccccacactgatgtcataaagatattcaaatagctgtgcattttagttttctttatggttatttttgcctatgttctgtgttagggatctaattttcccctgactttgtatcatatttctctatatgagcaggtctgtgcttgaactctcttgttggtcccctgatccatttctctatctctgtgcattaacgcaccatattattacagctttacagtatcttggtatttgaaagggcgacggccctaccttgtttttcaaaagtgtctggccctaccttgtctttcaaaattatctgactcttagcccaccatctttcaaataatttttagaagcagcttttaaagtttgatgaactatcctattgagattctgacattttattaaatccacacagcaatttagagaaattgaaaacattatatcaagatctctcatctttgaccactgtctatatctcttacggctgtcaatgatacactgtaattttttttccctataaaggccttatttgactttaggaggtcctttttttcccccattaattgtataattggttatttaatagtttcagaattacaaaaaagttgcaaagatagtacaaaacttccccaccctgttttccctgatgttaataccttacataaccttgctactttgtcaaaaagaagagataatattaacactaaacaaactacagactttgttttgatttcacccatttttccattactatcttccttctgttccaggatctcatcccagacacagcattacatttagtgattacatctccttaggctccccaaggctgtgacagcttctcagtattttgtagaatactcagtttgtttgatattttctcacaacttgatttgggttatgaatttttgagaagagtatctgctattgcctttttttttttttttttttttttttgagacagagtccggctgtgtcgcccaggctggcgatgcaatggctcaatctcagctcactgcaacctccacctcccgggttcaagcaattctcctccctcagcctcctgggtagctgggattacaatcatttgccatcatgcccagctaatttttgtatttttagtagcgatggagtttcaccatgttggccaggctggtctcgaactcctgaccttgtgatcagcataccctggtctcccaaagtgctgggattacaccgcacccggcctgctattgctttttatacgctgactttggatccagtgaacttgttgactttttttttctacacaaaaaaaagttcctgtatttttaaaatgttaacatgctaattaatgacttcatttttactttcggagtttcaccatgttggccaggctggtctcgaactcctgaccttgtgatcagcataccctggtctcccaaagtgctgggattacactgcacccggcctgctattgctttttatacgctgactttggatccagtgaacttgttgacttttttttctacagaaaaaaatgttcctgtatttttaaaatattaacatgctaattaatgacttcatttttactctcattgacaatcatacctcacttcattaacataatgcattggctaggacttctggggtgatattgaacaagtcttgtcctatatttgaaaggggatactcttatctttactatgaaaggggatactcttatctttactatgaagtaaaaacattcactgcaggcttgttttgtacagcctctttattgggggttaaggaaattgccttaagttctagttttttaaaaaaatttatcataagtttaattttatataatgacttctctgcattcattgggaagattgtattatttaacatcatctgatgattggtgaataaagcaggttttatgttgaaaactgtattcctaaaccctgcttgatcatgattatgtgtatctgattcgtatacacatgcagctgggtactactgagttatacttttttattacactatccttgtctggttttgctaccaaggttgtaacagccttatagaatgatttggattgttatctcacttcttatattctctaccatagtttataaactcctctccattggaaattatgtccctttttctattactaatattattaatctctccatgtttctccatcagttttgctaaagatttgacagttttgtctttttaaaatgacttgattttgttgaccatattcttccttcttttccatgtaattaatttctgttctttttgtagttctttcttgttcagttctgtatttcattgtttccattagatttcctctttgcgacatgaagaaacgtctttaggggtcaaagatcttggggaaaaaaactatcttttgaatacagatttccaaattaattgcattatactcatatagcatggcccatatgctactatttcacatttgtcaaagcatccttggtgatcttaagatatggttaattttaattgttcaatatattagaaaagaatgagtattgtctaattgttaggtatcaatttctatttatgttcataggatcaacttgttaactgtgttcagatttttagtattcttggtaattttttgtctgcctgatctatctgttctagatataataaaatctcccaatattcctatggttttatccaccactccttataattaatagtttttgctttatatatatatatttcaaggctatgtttttaggtgcaaacaaggccatgactctttgttgagaaacacagggaagttaatctgcttacatttttaattattgatgtatttgtttaatatgcttttggtcatttattttctcctttcctgcattctactaaattgatcaagttttctttagtcccctttcttccttctgcttatttgggaggtttcaattatatttattacttcactgtctatctttaagttcctaatttctacataagcatatatttttttaacagactataaagtactaaagcaaacatgttggcacacgttagcaattcactggatttcccattcccaccttcattaatattgtctagaattttaattatacctgttttaaacaaatgaaaacatttttacagtcaatgattaattatatttactggtatttcaagaatttattcactcattcttgtttcttgaatctcactcctcgtccctcgaggtttactttttctcattgcaataaatccttaaatgtgtctttaaataagtgtataaggtagtctatttgtatttctaaaaatgtctttatgagacatttttgaatgacattttagccaggtatggaattcttaggtaacctttatcttctctccttattttgaagatattattccattgtcttctaacaaacctgatgaggaggtctgcatcagcgtaatgttcctttctaataacgtctagtttttcccgcggtagctttcagaatagatgttatgtatagatttttgtttatcctgctcaggattgatgtgaccaatgaaggtctttcttccattctggagaattcttgggccagtgtttctttaaatagaacttttctgccattccatttctactcttttcaacctataaagtataatgacccgtcttaatccatcctccatttgtctcaatctttctgtttttcatactgttttctgtgctttctgagtaacttctctttttaactgcatctggtaatagcatttccctagatgttttaaatacagtaactatgttttctgttctatgatttccaattggtactttttttatatctacctttctcaaatggatgaacattttatggacactattctttatttcttcaaaaatcgtaaagtcacactaacactatttgaattgcattttgaaaggactgaattcatgtcttgattgctagttttgctgtcttgttcattttaagatttcctaactttaacccagtgctttgcaagtttagtttctaagtgtttttcctatgggttatcttttcccctcctctctgaacttttcttccctccatgtctttttggctgtctctacctcacccatgagaagcacagtccagagacaatcttgtattgtcaactggggattttgtgccatgtgacaaaaggggtgtattagtcactgagcaagattaaagcttaggctgggtcctctctgcatggctttgttttttcaccccctgccaccactcgtaagtaaaaaacctgggtatccatcactgtttgttgttgttgttgtttttccaggctccttttatgtcaggagagtccaaatccagtacctgtttgccacaatgagcctgggacctcaacatgcatggagtgcttccggacctcattacccaagagcagtcagatttttaatttcctctgcctttttcaagatcattagttcagaaggtttatgttttcaattccacatatccttgcatttttctttcaagttttgacccatatggatatcttaaatattcctattattgcaagtttatattaaaaggaggttaaattgtgaactcacaaactcatagcatcatagcaccatctcaatcaaaagtattatcttctgtgaactacaacagttttcacttctttcgcaagtgtggagtgacgtttgcctgaggctgtatgacctgtgatatcatgacaaattgaaggccaaagcagatgcgaatccagctgttttctattaagtcaaatgccaaggagatttacaaagatgtaaaataatgcgcctcttctcaataacctttggttttgaaaattgttatttttcataaaaaatgttgcttccattaacctgtaataggtttactaccattattttaaataaaatacacatttcaaatggcttaattttttcttaagatataattgataagtaaaaattgtatatatagtgtacaacatggtgtttcaatatacatatacattgtaaaaggatatcaagctaattaacatatctatcacctcactatttttgtgtgtgaagaacacttaagatctactctgttagcaattttcaagtataaactatagtcaccatactgtgcaacagatcaccaggactttttaatcccatctaaccgaaattttgcaccctttggccaacatcagctcatctcctctgacccctgacaaccaccattctactctctacttgtatgagttcaacttttttagattccaaatataaatgagatcatgcagtgtttgtcttaccgtaatgtcctccaggtttatccatgttgtcataagtgacagcatttccttctttttaaaggctggaaaagtatgccattgtacatatattcattttatttatccattcatcaatccatggacaattaggttgattccacatcttggctaatgtgaataatgctgcaatgaacatagaagtgtatactgattttgtttagatatgtagccagaagtgagattgctgggtcatacggtagttttactttttttaaatgaatttccatactgttttccataatggctatattaatttacgttcccaccaacaatgtacacaggttccctttctccatatctttgccaacacttgaagctttttagtttgattcaatcccttttgtctatttttgctttttctgcctgtgcttttaaagtcttatccaaaaatcattggtcagaccaatgacaagaagtttcttccgttacgttttctcccattagtttcacagtttcagctcttaagtctttaatccattttgagttgattttgtaatatggtgtgtctaatttcattccttcatatatggatatctagttttccccacccacttatttaaaaaaaagtcctttccctgttgtgtgttcttgacacttttgtcaaagattgactgactataaattacgggatctatttctgggctattttgttctattggtctctatgtctggttttatgccagtatcatgctgtttttattactgtagctttatactcaattttgaaatcaggtagtgtgatgcctttccagctttgttctttttgctgaaagtttggttatttggggtattctgtggtttcttatgagttttaggagtatttttctatttctgtgaaaaatgacactggaatttttttatggaaattgcgctgaatctacacatcactttgggtagtatggagattttaacaatagtttctaatccatgaacaccagatatttttctatttgtgtcttcaacttctttcatcaaagtcttatagttttcagtgaacaggttaattttattttattatattatatatattataaattctggttaaatttattcttaaataatttgatggtactgtaataatttgatggtactgtaaatggaattgttttcttgatttctttttcagatggtagtagtacctggaaacaatattggtttttactgcaactttactgaatttgtttattagtttaacaagtttttggtggcatctttagggtcttctatatataagaccacatcatcagcagagacaatttcacttcttctgttcgaatttgtatgcctttcgtttttccttatcttgctcctgatcttaaaggaaaacctttctgtcttctaccactgatagtgatgttagctgtgggcctgtcatatatgacctttaatatttcgaggtatgtgccttctatacataatttgttgagtttttatcatgaaaggaagttaaattttgtcagatgctttttctgcatcaattgaaattatcacattttctatgcttaattttgttaatgtggtgtatcacatttacttatttgtgtatgttgaaccatccttacatcccagtgattaatctcacttaatcatagcgtatgatcctttcaatgagctgttgaatttagtttgctagttattgtgttaaggatttttgcgtgtatgctcatcagagatattggcctgtaattttctatttttgtagtgtctttgcctggctgtggtatcagggtaatgctgacctcataaaatgagtttaaaagttttccctcctctttaatttttggaagagtttgagatggctgggtgttaattcttccttaaatatttggtagaattcaccagtgaagcaatcaggtaccaggcttttctttgttgggaggtttttgattatagattcaatctccttactctttattgatctgctcagaacttctatttcttcatgattcagttttggtagcttgtatgtttctaataatttgttcacttctaggttatccaatttgttggtgcatacttgttcatagtagtatcttatgatcctttgcatttctgtgctatgtctcctcttccatttataattttataatttataatttattttataatttataatttataattttataattttgagttttttcttagcctagctaaaggtttgtcaattttatcttttcaaaaaaccagatttcactattatgatcatagtttcgttgattttttctattgtttttctattctctatttcatttatttttgctctgatctttatctttccctctttctctagattttgggcttaatttgttcatctttttctagtttcttgaggtgtaaagttaggttctttgagatctttgtttttcttaatatagaatttaacactataaacttcccttttagaattgctttctctgcatcccacgttctggcatgttgtgtttccattttcatttgtctcaagatattttttatttcccttatgattttttctttgacctactggttgttcaggagtgagtgtgttaatttccacatgttgttttccaattttcctcattattgatttctagtttcataccattatagtcagaaaagatacttcatatagacatcaatcttcttaaatttgttaaggcttgttttgtggcctaacatatgatttgtcctggagaatgttccttgtgtgcttgaaaagaatgtatattcttctgcagttagatggaatgttctgtatatgtgtgaggtccatttggcctacagtattgttcaaatcttattgttttctgcttactctatacattactaaaagtgaggtactgatgtggtttcgctctgtgtccctatccaaatcacatcttgtggctcccacaattcccaagtgctgtgggagggacccagtgggagatagctgaatcttgggggcaggtctttcccatgctgttctcatgatggtaaataagtctcacaagatctgatggttttgaaaatggtagtttctctgcacaagttctctttgcctgccaccatccacataagacttgacttgttcctccttgccttctgacatgattgtgaggcctccccagccatgtggaactgtaagtccattaaacctctttttcttcccagtcttgggtatgtctttatcagcagcttgaaaacagactaatacaataaattgtaccactagagtggggcgctgaagagatacccaaagatgtgaaagcaactttggaactaggttaacaggcagaggttggaatagtttggagggatcagaagaagacaggaaaatgtgggaaagtttggaacttcctagagacttgttgaatggctttgaaaaaaatgctggtaagtgatatgaacaataaggtccaggctgaggtggtctcagatggagatgaggaacatgttggcaactggagcaaaagtgactcttcttatgttttagcaaagagactggcagaattttgtccctgccccagagacctgtagaactttgaacttgaaagagatgatttagggcatctggcggaagaattttctaagcagcaaagcattcaagaggtgacttgggtgctgttaaaggcattcagttttataagggaagcagagcacagggaatgcttccagtttttgcccattcagtatgatattggctgtgggtttgtcatagatagctcttattattttgagatacgtcccatcaatacctaatttattgagagctttttagcatgaaggttgttgaattttatcaaaggccttttctgcatctattgagataatcatatggtttttgttgttggttctgtttatatgctggattatgtttactgatttgcatatgttgaaccagccttgcatcccagggatgaagcacacttgatcatggtggataagcttcttgatgtgctgctggattcggtttgctagtattttattaaggatttttgcatcaatgttcatcagggatattggtctaaaattctctttttttgttgtgtctctgccaggctttggtatcaggatgatgctggcctcataaaatgagttagggaggattccctctttttctattgattggaatagtttcagaaggaatggtaccagctcctccttgtacctctggtagaattcggctgtgaatctgtctggtcctggactttttttggttggtaagctattaattattgcctcaatttcagagcctgttattggtctattcagagattcaacttcttcctggtttaatcttgggagggtgtatgtgttgaggaatttatccatttcttctagattttctagtttatttacgtagaggtgtttatagtattctctgatggtagtttgtatttctttgggatcggtggtgatatcccctttatcattttttattgcatctatttgattcttctctcttttcttctttattagtcttgctagcggtctatcagttttgttgatcttttcaaaaaaccagctcctggataaaagttcgaaaaatttgcagcctgacaatgcgatagaaaagaaaatcccattttctgaggagaaattcaagcctgctgcagaaatgtgcataagtaaggaggagccaaattttaatcctcaagacaatggggaaaatgtctccagggcatatcagaggtcttcacagcagcccctcccatcacaggcctggaggcataggaagaaaaaatggttttgggggctgcgcccagggtccccgtgctgtgtgcagcctaggcacttggtgtcctgcatcccagctgctctagccatgactaaaaagggccaagacacagcttggcccatggcttcagagagtacaagtcccaagccttggcagcttccacgtagtgttgagcctgcgggtgcacagaagtcaagaattgaggtttgggaacctccacctagatttcagaggatgtacggaaacacctgaatgtccaggcagaagtctgctgcaggggtagggctctcatggagaacctctgctagggcagtgcagatgggaaatgtggggtcagagcccccaaacagagtccctactggggcactgcctagtggagctgtgagaagagggccaccatcctccagaccctagaatggtagatccacctacagcttgcactgggcacctggcaaagctgcagacactcaatgccagcccatgaaagcagcctggagggaggatgtaccctggcaaagccacaggggcagagctgcccaagaccatgggaacccacctcttacatcagcatgacctggatgtgagacatggagccaaagaagatcattttggaactttaagatttgattgcccagctggattttggacttgcatgggccctgtagcccctttgttttggccatttctcccatttggaacagctatatttacccaatacctgtacccccattgtgtctaggaagtaactagcttgcttttgattttacaggctcataggcagaagggacttgccttgtctcatatgagactttggactgtggacttctgagttaatcctgatatgagtgaagactttaggggactgtttggatggcatgattggttttaaaatgtgaaaacatgagatttgggaggggccaggggaggaatgatgtggtttggctctgtgtccccatccaaatttcatcctgtggctcccataattcccacgtgctgtgggagggactcagtgggagatagctgaatcatgggggtgggtctttcctgtgctgttctcatgatggtgtataagtctcatgagatctgatggttttgaaaatggtagtttccttgcacaagctctctttctttggtgccatccatgtaagacttgacttgctcctccttgccttctgccatgactgtgaggccccccagccatgtggaacagtaagtccgttaaacctctttttcttcccagtcttgggtatgtctttatcagcagtgtgaaattggactaatacaggtactgaaatcctctgactttatttctaggtgtttgtttgtttgtttgtttttgagacagagtctcactctgtagcacaggctggagtgtagtagcatgatctcggctcactgcaacctctgcctcccggatcccggttaagcaattctcctgcctcagcctcctgagtagctgggattacaggcgcgtgctggagatggcatggtggggttccaccatgttggaaccccatgagactttggactgtggacttctgagttaatcctgatatgagtgaagactttaggggactgtttggatggcatgattggttttaaaatgtgaaaacatgagatttgggaggggccaggggaggaatgatgtggtttggctctgtgtccccatccaaatttcatcctgatggggttccaccatgttggccaggctggtctcgaactcctgacctagttatccgcccacctcagcctcccaaagtgctgggattaccggcatgagccaccacacccggccatatttctagtttttaaaatacctaaaactatacatattgataggtataagccacataagcaaaagttctttagggtcctcattttcatgagtgtaaatgggttttgagaccaaaaagcttgagaatctctggtctacagtaaatctgtaacagtctgggttatttgagcagattggatggaaatctgtctttttcactattatgatctcaaggcctagcacaaagcttaatacacagaagtctctcgataaatgattattcagctattgtttcagcaaatatttgagtacctactatcttattaggttggtcaaaagtaatagtggttttcgcaattacttttaatataagacccaatgctaggtcaacttcatggttcattgtaaatcaaattgaaatggcccctgccataacttatttatttaatatgtcttcagagtttcagtccagctgggaagagacattcaataaacctttaaagattatggtaaatgctttaaacaaacaaacaaacaaaaaacccaggatgccgaaatgaggatggttatgtttgtatggtagatacagaatagtcagggatctctgaggaagagaaactaagactaaattttgaaaaagccagcctggggaagaagaagggaagaacatttcaaaaagacaaaacaggcagggcgtggtgactcacgcctgtaatcccagcactttgggaggctgaggcggaggatcactcgaggtcaggagcttgagaccagcctggccaacatggtgaaaccccgtctctactaaatatacataaattagccaggcatggtagtgcatacctgtaatcccagctactactcgggaggctgaggtgggggaatcgcttgaacccaggaggcagaggttgcagtgagccgagatcgcaccacttaactccagcctgagcaacagagcgagactccatctcaaaacataaaaaaataaaaagaacaaaacagcaatatacaaagataataaaggaaaaaaaacagaaaagacatcagagtggctagaggataatgaggggtgtaaaatgaggttgtacaggtattcaaaagccagctcttttggaactgtagattaagaggaagatcttgaacttaatcctaaatgtaatggaggccattaaagatttttaaataaggcctgacacagtgcattttaagatgattcatgttgctctgtggagaactaggggactagagatacttaacagaggaagcaggaagaccagttaaggggcagcaaaggatggcagggctccaaactagtatggtggcagtagagatacgcagaagtgaacaaatacaagatgtactttggaaacaatatagagaaatcttgctgatgatttgtgtatgtgtggcaaagaaaaaagaatcagaaatgagttccacatttctggtttggacaactgggtgcacaggagtgttatttggtgagtaactgagacacaggtttcagggtaagagcataacatcaaaagctatgtgggacatgtaatatttaaaatgcttacactaaagcaagtggagacactgagcagggattctggagaggtctctgccagggctctgaagtcctccacacatagctgatttgttgcatggtcagattaaaataaacactactttacaagataaataaataaaccagttcttaagtatttcgaattcatgtgtatatattcggtgctgctggataaatatcttcagatacaaatttgtacaccgttcctcagtagtgcaaatctaacaaattttccttaaggaaaacttttattttttaactttctcaagtaggagtttcaggacagtataaagccaaacattcatattaaagtaaccaaccctttcacaaaaagtaccactaagtccaaatattaaaagaacagttcccaaaagcaattaattacatacaggattaaagacaggcaaaagaccacctccatcatgaatcagatattataaaaggaaaatatgtcaagtctggcagacagtgttaaggttcagaactaaagttcagcttatatgtccctgtccaaaagggcactggacaccatttctcatgagaagctaaaacattcagaagtcaagctataacatggtaaccaaagtagtacatgtagaaaatgcagggttactcatccactttttgctcaagttggcttaccagccagaaagctctaaccctgaactggcaaaatggtagatgttcatttatccaaccatctaataaacaggtaatgcgtatcaactacattcagacactagagacacagtgataaacaatggagacacagtctctgccttcatggggcttatagctcactgatgaagccaaacaatcaaataagcatataaataacataagtaacaagcaataaatgtgatgaaagaaatattgtgctataacacatatatcagagagcctgacccagactaggtaataaagaaagacattccatgcctagttaacggtgtgcacaaggcttatgaggctggaggagtacagaaacctgtgtagctagaatacagaatggcataagataaaggctacagaagcacagaagagtcagaccctgcaagacctgtaggccatttaacgactggagatcccatacaacccgcaactgtagcacactacaagaatttctcccaggtgagatcggcactcacatctcaagcaggtcccctgaaaaacagcatgatttccacacatactcacatgtcaatgcctaagaacatgaccagaatgataaggagagctactctggcttccacaatgcagatcatcgtgcaggtagagaaaatcatttttatctggttcattttaaaggcccatcatgagataaacctaagaagaatggagaaaaaggcaataattgatataaaagtaaaacatgaatcagaaagcagaaaaacatctggagctaagagatacagatttaacaaagtctaacaataagtaaaatgttcacaaagaggagactggatgaataaattatggcacatacatttaatagaaaaatctacaatgataaaaaagcatgcaaaaactcttatggaacaatcgccaagatacattgttaaatgaaaagccaaggtgttgaacagtaaacacagtatacttcatttattaaataaaaagagaaacacactgtatacatatttgcttctatatgcatggaataacactggaaggatattcacaaaactattgacattggttatctttttttttttctttttctgactcaaacacatcttctgagacactggttatctatagagagggaaagatgggaggaggaattttctcctttttgaatttcaaaccacacaaatatattacctattaaaagtttaaaaaagttaatattcaatatgattttagatgagtacatatgaaaattttaatgaaaaggaacattttcaaggaaaataaaaattagcaaactgactgccaaatgggggggaaaaaaggtaagaaaagccttcttacaaagaatcctgtatgttaaaactttctggtacattttaataatctagcccccacaggctccatgagataaaactaatatttattgaatatttcccgtgtgctatatactgcatcaagcattacatgtatttgcagctcatcctcacaattcctgagataggtgttctcatcacctctattttacatataaggaaactgaagcatatccagtaagtaactccagaggtcagactctgcaaccactatcctacattaattctgtattaataaactggaaaaccttaaagaaatgcataattttctagggaaacaaaattacttgaaatctgtttgactgtaagtgttcttccaatgcctaaggaacaaattattcttagtctgcacagatagttcccaggacattaagaagaaaaagacgagggcttgccaattcattgaactaaattagaagagtggctttcaagaacatatttcctacaatgaaaatgtgttacaagaatagctatcttgtatgggatacttaccctgtgccaggcactggagtaagtgctttataaaagatctgggtgccacttggaaaacaatctggcagttcttcaaaacgttaaacatagagttaccacatgacccagtaattctactggtaggtaaaattaaaacacatgttcacacaaaaacttgcacatcaatgttcttaacagcattattcataacatagccaaaaaggggaaaaaacccaaatggccattagctgatgaacagataaataatgtatagccaaacaacagaatattatttggcaatagaaaagaacaacgttctaatacatgctacagcatagatgaactttgaaaacagtaggctaagtaaaaaaaggcagtcacaaaagctcacaccttgtatgattccatttatatgaaatgtccagaataggcaaatctatagacagaaaataggtgaatggttccctacggttggaggaagaggggaatgaggagtgaagagtttttttttagggtaattaaaatgttctcagattgagggcagtgatggccatacaactctgaatattactaaacaccactgaactgtacacactgtaaataggtgaattgtatggcagacgaattatatcttggtaaggctgttattaaaaatacatatctaggtgtattttcctaacaaccttaatgaaactgaaactaatatacttattttgtagacgagaaatctgcagctcagaggggacactatctactcatggtcataatctaaatagttgagaaagccagaattcaaatacgagtttttctgtctatactgcttactatctcccaacacaatcctatgcaaatgcactgaaaatcttcaagaaacggcccccctttttcttagaaaacaaacttatgggttgggcgtggtggctcacgcttgtaatcccagcactttggcaggccgaggtgggcggatcacctgaggtcaggagttcgagaccagcctgaccaacatggagaaaccccatctctactaaaaatacaaaaaaaaaaaaaattagccaggcgtgatggtgcatgcctgtaatcccagctactagggaggctgaggcgagagaattgcttgaacctgggaggtggaggttgcggtgagccgagattgcgccattgcactccagcctgggcaacaagagcaaaagtccgtctaaaaaaaaaaaaaaaaaaaaaaaaaaagaaaacaaacttatgactaacaggttcatgaaggcagcctcctaagaacaaataattcatatacagttgaaaatcccaaatccaaaaaaatcagaaatccaaaacacttctggtgtcaagcatttcagataaggaatactcaacctacaatgctattaagcatttcaaacctacaataagagggaagctgtccatttaagaagctagcagatggcttccaagtgcatcttaattcaagagtgccctggagaataataaaaataatagctataatttattaaacttttacaatgggtaaggcctggcaccaagcaccttatgtgaatgattatgtttaattatcataacaacttaataaggtagatgccattattacccaggttttacagatgagaggcaagccttaagaggtattttttcccaggttacaagctaaagggtggcagagctagaaatcaaactcaaatctgttagattcctgagcctcagccctcaaccaccactcagtacatttctaggctattaaatttgaaagccataatgaaatggaacgttcttgaaaggaagggagataataaacacttggcagacgtcaggggagtactttcctcaaaaagttctccaagcctttgccatttataggcaactttcttcacatttccaaagaacaaataattcttatgctttataaattgtgtaaatttcagcaaaaagagacaaaagtgtttcatttgaagaaagcacatggattttcaaccccaaatataccttattttgacataataagaatgtgtatgtaccaggaatgtgtctgagcactttataattgttagcttctcaaatcttcatgacaactatctaaggtaggtactattaataatccctattttacagatgaggaaggggaagcacagagagggtagatgactggcacaaagtcacatggctagaaagtggctaggattaaaaaccaagtcatctagctctaccctccagcacttagtctactcaaccaactctcaaaaaagaatatgctatagctaatatatgattcactggactcctagcactgtggattatcacactgactcccttcacatgtattatcccaactgacaaccaagaaggtaggtaagtttactgcctattgcaagatgaagaccatgaggctgagtgatgtgctaatttgcccaaatacacccaattaacacatatcagaaccaaaattttattaaacccacgtctttctgactctacatcacaccactagtcactgtgtcatgaaatactatggtaggggtcagcaaattacagcaagcaggccaagtccagtctgctgtgtttttatacagttcacacagccaaaatacaaaaattcggttgaatcaaaaatagatgggccaggcacagtggctcatgcctgtaatcccagcatgttgggaggccgaggtgggtggatcacgaggtcaggagatcgagaccatcctgactaacaaggtgaaactccgtctccactaaaaatacaaaaaattagccaggcgtggtggcacacacctgtagtcccagctactcaggagggtgaggcaggagaatcgcatgaacctgggaggcggaggttgcagtgagccgagatcgcaccactgcactccagcctgggcgacagagcaagactccgtctcaaaaaaaaacaaaaaaaacttgatggttgaaaaaaacaaaatatttcatgagaaaattaaatgaaacctaaatttcaatgttcataaataacattggctgtgttttactggacccagacacacccatttatttacagctgctttcacactacaaggacagaactgagtaattttgacaagacatcggtatatcgaacaaagcctgaaatattctctgtttggccatttacagaaaagatttgctgaccctctttgttattatatttaaaactcttattaaaagggaggagtagtgcacaaaaagtaccccccaacccccgaaaaaaggaagaaaaagcatggcctcaaaaggtgactggagtaggaatggaaactaacctccaactttcaaggaacaaataatgtctctgttccataaagtgttccaaggcctagaaaacagtggagggcttcccagttcattttaattaactggttcacagaggtttacaatccctaagctgttttaattggaaagaacgctgcagaatggaaataacaacagctggcagttatggaactttccctgtgctgccaggtgctgtggttaaatagaagatttccatttaatcttcctgacaaccaggaaggtagggtgccattgttatccaattccacggatgaacctgggtcctcgggatgttaaacaaattgccgtatgttccacatagagctcagcactctaaccctcatttctgccctccagagattagtcttaacaccccaccatttacttttattaataaatctgcaaacataaggaaatacataatttcctgaaaaaatataacgtaccaaaagtaactatcaaaataatcttggtgagctgtataaatttcctaccaactcccaggaagcaaataagtatgtgccacaaattgatctgggtcataagaaaacagacaagttttaataccctagctcactgggttgcaatagcactcatctctaactcatcaccactaaaaaaaaaaaaaaaaaagcacaattaaaaaaaaaaccatgcaagataatgatagctaacatttttagctgaactatgtgccagacactaaacactcctcatgcaataactcatttaaactaggaataaatatcccctgcagactaagacataaggaggttaaatggttgtccaaaatcacacaagcgagagggcctggatccaaatccaagccagcaagtgaacaaacccggcatccttaacagactttcagctaataagtctgagaatcctaattatacatgctcaatccagggaaaaaagaaattgacaaaactgagccaaacttaagggcataaaggggtgcgtggtacacctacagctttcaagcaatgtcaacagtctctacgattcactcagcaaagcagttctgaaccaaaactagcttcctctaaaagagaccaaactccacataaacgttacaatatggatgaacttcaaaagtgttctgctaaaggtaagaagaaaacatcataaactgtacaattcagttttcatggaacgtccagaaaagggaaatctcaagagccataaagtggattagtgcttgcctggggctgatcctcaaatgggctcgagggaactggggatggtgggattggttgacgtaaacattctaaaagtgggttgcggtgatggctgtacaactcatacatttaccaaaaaatattcagttgtacactgggtacattttgacgtaatctgcatctccacagaactgtgtaaaagaggctgagtaccccagcaactgcttcttgtcgaaagccatttcctatcctccgcgctaggcgtctcacaggcttttcccccagtcaaatcaatgctaataatcggaaatagcaagttctgagaaacgctagcgtagaatgggcgcactaggggtaaggggatgggccccagacttcagcagccgttctgggaagttgctcgcctttttcgaagactctagctgcaaaactggaagccgtcggtggggcaaggcagagaagagaccacgtctggcggatgagtcctgtgattatcaggtcacctgggtaacgcccaaccacgacgggctgggtctcagcgcgaggcctgcagcccggcgccgactggaatccccagcactgccgtctggaggacatcggcggtatctccccaagagacgggaagtctgtgtgtcgaagaggcgcgggacgcaagcccaccaacctggccgaccccagggaaaggccgagcgtccagcccgcgggggcccaagatggtgccagagttcgaggccctctgtgcatgcaccccgcccgccttcgaatctagcctgttcgccgttgtggtttgtcctcccggttcctctgaaggagttggtcagtagaaccatggcctccattgactacgtcctcagagtcgcagctctcttcagtcgagctccagtcacagaggacggttgtggtgagacccaggcagaagtatttccggtcaacgaggtcgcgggtagtgcgcatgcgcttcgtgcagggccctgcgcaagggcgcctgggaaaccttgcgagaagtgacacacgccctgtcctcagggagcccacggccgactgggaaacaggagaacgggtcaaacgtgggacgtccgtcagctataccgaaaggtctgtgatagagcttggagaaatgtgcatttggacacattatttttacattgtgatctagacagtgaggtaatcttttaaaaaataagttttagaattctattaaatttcagttttagaattatatttaatcatattttgaatattttgaaatattttgaaatttcatacggtttttttgtttttccggtttttttgagacagggtctcgctctatcatccaggctggagtgtagtgatgtgatcacagctcacttcacctcaacttcccaggctcaagtgatcctccctcctcagcctcctgagtagctgggactacaggcacgcaccattacacacagctaattttttttttttttttggtatttttgtagaaatggggtttcaccacgttgcccagactgatctcgaacttctgggctcaagagatccgcctgcctcggcctcccaagatttcgttatgttgtggggaaaagatgtatgattctatgatcagaatgaaagctctgagagggcagccactgatgagtgtaggtgcagtatcctctacaccttgcatggtacttggcatggaatggatgctccttgagtatttctcaaatgactgactggagtctttgaaaaaggcaccctgagttactgttaacagacagattcgctaataattagctactgttaatcggatagattagctaataacaccaacttttgatttgtctcagagtgacctagtgtgaaaagtagggttgcagatttagtaaataaaaaatgtaggataaccctgtcaaatgtgattttcagataaactaagcaaataatttgttagcataagtatgtcccgtttggatatgctgggtgtcctatattttatctagcaacttagaagacatgttaaggtgggggggaaaaatgattgtgttcctcttagaaaaagaactggaggagaaaagaaaacggtatccggaatttgtaaataagtacttccaaacaattctaaagcaggtcagaaaactacacttgagaaactgtgatttataaagttcgtggtaagtgttgtatttatatcatcttaattgaaacctcttacacagtagaacgattatttttattttataagtgcaaacagaagctcagagataggaggttacttgtccaagttctaatattttcactgtcaccccaaaaaatatgtattgaggcctctcggtggctcatgcctgtaatcctagcactttgggagactgaggcaggcagattgcctgagctcaggagttcgagaccagcctggccaacatggtgaaaccctgccactactaaaagtacaaaacattagccaggtgtggtggcgctaccctgtagtcccagctacttgggaagctgaggcaggaggatcgcttgaacccgggagggggtggttacagggagcagagatcacaccacttcactccagcctgggagacagagtgagactccatgtcaaaaataaataaataaataaataaaataataattattatttattgagagctgactgtgtgctgctggtctcggatttctattccacataatctgcctccagagctggaaaattccagtgtctgaccattcctcagcctccctccccttccccactccagctgcagtttccatggtaacaaactgaacctgcttctgtagctaacaagagctaagagtttttgagagggaataagccagaacaactgacgtcagcataccctggctgggggatgggaaggactgcttgaagccctaaagccttctattcctccatcaatggtttatgcaagaattttgtatgtgtcaacatctgtccttggatggagtctctgcaaaagaacaaaaattgtctatgtaaacctctgcagaccccatgaattcataagttttcacttcaggaattgcttcaaacactggtgacataaactttatgcatccttaccatattaaaatgtatttagtcattattcaaccaataatgatggggggcacttctacatatcaaacagtgctagatcccaaggatataattactatcaaaacatacacagtctctattttcctgtttcttagagttcagtggaagagacatttgtttattcttcagtgtattctaaggacccttatgtgtgagacatgtattagggactgggagatacacagatgagttcaaaacaaatcgttgagctgcatggaaatgatcctggtgggattggggtcagacattaaatagataatcacaaaacagcagatatttactgagcagctactgtggtgccaggcactgttttaggcaaggggaggacagcagggaacaaaatagacttggtgtctgttctcatggaacttacattctgatggagagggaaaatatataaatgaattcatttgcttttagttagaagaaaaaggatattaaactcaaattgacttaaataaaaaggagaatttattggcctaagtaactgaaaatgccagagatagaactgatctcatcagtattcatgaacataatttatgttgttgcagatctctgtagtttttctgcccaacactccttccccaggcttcctgccacagaagccttctttcctatggagaactggttagcatctgacctaggcctggtcacttcatgctgttgctatgcccacagtgattggttcaggaatgggcacatgactccaatgggccagtcagagacttactgacctgggacttttccttgggaattatgagaaatatcgttccctttgctgtgatgctaaactggtctgaagtgtgcctggcctatagccatcttttttgcctatctgaataagtcaagaaagagcatcccactgtgtgtttttaagcttctactagataatgcatgtaatgtgcttaacacagagtaaattctcaataaatgttagccagtgttgttagtgatttacaaaggaatgagtgagaagaaattatttgcaggaactgaaagattgtgcttcaaaatgaaggtaaatcaggagggtttttggagtgcatggaatgaaaacatggaggtccacagtatagagcaatgtttcctctgagccacgatgaggttttatgagctgtccagggttcactgaagaatatacttgcctggattcaaaatgcttggaccaacccattcagacattcactgaccccttccctgggtaagattctgtaaaagagaagatgcacaaggcatgatcatagccattgaggaccttatactcaactggagtagcagggaggtgaacaaccagtaacagtaaggccagaggagtacggggcaagcttcagctccacattcatttacataagaaatacacaggaacatatctaacatgccagccatggtgcgaggtgtaagagatattgtattgaaccaaactgatgccttttttattggaacttataatcaagtgcagtggttagcaaaacttcaggaacagaccagacaataactattttaggcttgtgggctgtacagtctctgttgtaactatgcaactctaccattttgtgtaaaatctgccatggacaatatgtacgtgaatgaacatggctatgttccacattattttgggacactgaaatttgaatttcagatgattttgtcacatcaaaaatactcttctttggatttgttttcaaccatttaaaaatactgaaaccattcttagctcatgagccatacaaaaacaggcagtggggccagttgtagttgctcatgcctataatcccagcactttaggaggccaaagcaggaggatcgcttgagcccaggagttccagactagcctgggcaacatagagagaccctatctctactaaaaatagaaaaattagctaggcatggtggcacatgtctgtaatcctagcactttgggaggccaaggaggtaggatcgctttagcccaggagttcaagatcagcttgtgcaatgtatcaaaacttcacctctacataaatattaaggcttaaacagcagaaatgtgttgtctcacagttctgaaggccagaaacccagcagggctggttccttctgacaacagggaagaaggatctgttccaggcctctcccctagctgctgggggtttgctggcagtcattggccatcattggcctccattggccattgccctgatctctgtcctcatcttcacattgtcttctcctgtgtacacatctgtgtccaaattcctccttttcataaggaccccagtcgtactggattagggcctgtcatactccagtgtgacctcgtcttaatgtcttacatctgcaacaaccctatttctacataaggccacatccttaggtagtctgggggctcagactttaacatatgaatttctggggtggggttggggatcccacagcagcaagtgtgccagcctctttgctggtctccctgcttccactttttcccacttcctttcatttccccagcctaggcaagggtgacctttctaaaatgcagacaggaccaggagcctgctgtgagtcatggggctcactgaggccttgttttttggttttttgctttttgggatttttgtttgtttgtttgtttttgagacacagtttcgctcttattgcccaggctggagtgcagtgacgaggtctcagctcaggaatcaagggaggattcctaggtgtcgtgggccagcgtcccctctgcacgttcagcccatgtggatgttttgaagcttcctctcctcggggggcacaagcttcagccagaaaattcatcccatttgtctcaacatttctgtaactctccaaagaaatttgatcatctcccactatcagcactgtcagttggggtctgtccccaggactccatccatgttgccaccatctctccctgggcatctgctgtggcctcctaaacgttcttccttttctatctagtcaccttccacccgttccacacacacacagtggccaaaaagaaagcctcactgtgtaatctcctgcccctgctccgggtaccccagggctgccgcccatcagggtaaagtccaagtggccaacatgatgcctcgggccctccaaacccaaccttgccagctggcccagcttcacctctctctgctcccatcctgggtctccatgctgcggcagtaatgacaatcttccagttccctgcggaggccacgtgccctctgaggagctggctgtactcactgtccccatagactcatttctcccctcccattttctcctcagttcactccaaccaggatttgctgccactctacaaaatcttctcaagatcaacaataccctctgcctgaccaacatggtgaaaccccgtctctactaaatacaaaaaattagctgggcctggtggctcttgcctgtaattccagctacttgggaggctgaggcaggagaatcgcttgaacctgggaggcagaggttgcagtgagccgagattgcgcccctgcactccaacctggacaacacagcgagattccgtctcaaaaaaaaaaaaaaaagaaaaaagaaaaaacacacacacaagaaaacaaaaaacaaacaaaaactacatcagacactttctaaggattaggaatgtattggttaaaaatcaggtgaggcagttgtctctggagatgatgtcttaaaattaaaacatgaatggaaacccaatatggtctacccatacaatggaatattgttcagccttaaaaaggaaggaaactcgggcacttcttacaacatcgatgaacattatgacattatgttagatggaagaagccagtcacaaaaggacaaatactgtatgattccacatgaggtacttagagtagtcaaattcatagagatagaaagtagaatggtaagtgccaggggctgagccacaggaaatggggagctgttgtttaatgggtacaaagtttcagtttttcaagtagaaaagagttctggggctggatggtggtgatggttgcacaaagatgtgaatgtatttaatgtcactgaacttgaggattaagctctgattcttttatcttgcccaaattcctatgtaaggggtctgggaagtcatgccctacaaaccataaattctcatcagataggttttgtttaaccctatatattgtaacttactttctcatctgactccggcataacgttacgtgatgaagaagaaagtcaaaatattttaccccaaacatgtttctttgccatgttttgaaatggccattgaaagctgtcctttgtgggggaaaattcgcatctgtaaagaatctctataaacatagctagatctttttcttctaggccttcccaatcctgaggagattaactaagagtctagcaccttttaaaggtctgaatatgaaacatttgtcatctattgtgtctaagagcagccactataagacttcaaaagaaccctggggccaggcgcggtgtctcacacctgtaatcccaacactttgggaggctgaggcaggcagatcacctgaggtcgggagttcgagaccagcctgaccaacatggaaaaaccccatctctactaaaaatacaaaaattagctgagcgtggtggcgtgtgcctataatcccagctacttgaggggctgaggcaggagaatcgcttgaatccgggaggcagaggttgcagtgagccaagatcatgccattgcattccagcctgggcaacaagagccaaactccatctcaaaacaaacaaacaaacaaaaaaaaccttgtccacaatcttttatcttaacctgaacattttctttctgtagattccaactatttagacaaactcaaccaattgtcaaccggaaaatatttaaatttacctatagcctggaagcaccgcccccatctcatgcctccctaaaatgtataaaaccaagctgtaccccgaccgcctggggcacatgttctcaggatctcctgagggctgtgtcacgggccatagtcactcatatttggctcagaataaatctcttcaaatattttacagcattggactctttttgttgacaaactgtacacttaaaaatggttaagacagggccaggcgtggtggctcatgcctggaatcccaccactttgagaggctgcagcaataggatcactggagcccaggagttcaagaccagcctgggcagcatagtgaggccccatctctacagaaaattgaaacctgagacaggcatgatggtgtgtgcctctctagtcccagctacactcagaggcagcgagaagattgcttgagcacaggagtttgaggctacagtgagctgtgatcacaccactgaactccagcctgagtaacgagcgagatcctgtctccaacactttttaaaagcaagggttaagatggtaaattttatgttatatatctttttttttttttttttttttttttttttgagacagagtcttgctctgtcacccaggctggagtgtggtggagtgcagtggcacaatctcagctcactgcaacctccacctcccgggttcaagcaattctcctgtctcagcctcccaagtagctggaattacaggcacgtgccaccatgcccagctaatttttgtatttttaggagagatggggtttcaccatgttggccaggctggtcttgaactcctgagctcaggtgatctgcccacctcagcctcccaaaatgctgggattataggcatgagccactgtacccagcctgtgttatatatcttttgccacaattaaaaataatttttaaaaattaacacataaataggccgggcaccatggctcatgcctgtaatcccagcactttgggaggtcgaggcaggtggatcacctgaagtcaggagttcgagaccagcccgtccaacatggtgaaaccccatctctactaaaaacacaaaaaattagacaggtgtggtggtgggtgcctgtagtctcagctacttgggaggctgagacaggaaaattgcttgaacctgggaggcggaggttgcagtgagctgagatcacgccattgcactcaggcttgggcaacaagagcaaaaccctgtctcaaaacaaaaaccaaaaaaacagaaaaaaaaacacgtaaataaatgacacctaccttgtaagctcatcctccatgctgggaacacgtttttgcctcttggcttggcttcccaaagagtatattaccccagagtttcagagatacacacattctagtcctcacctaagctaattccattccagtccaactcttccacttttaaatggcccccttgtaggaacatccacatcactcatctgggaatatcatcatttggcaatttaatgatctctaggcaaagacacagtagagattttacccactggtgtggcttggaatgctgcctgtggtggctcagtgctgtgctcaacttggcagaaccagagtgatgtttcacagagtccactttctgttatggttctcggctgggcttggccaccagaggtgtttgcctgggatggagaacgcatgggtggagcggcagctgtgtgtgccctgtgtgtgtgcgtgtgtgtgtgtgtgtgtgtgtgtgtagaggttacagttgggccaggtgctatgcagctcatgcacgtccctgccagctgctggctcaccttgtgtatgtgtgtgtgtctgtgtctgtgtgtgtttagaggttacagttggaccaggtgctatgtgtgtgtgtatgtgtgtgtttagaggttacagttggaccaggtgctgtgtgtgtgtgtgtgtgtgtgtgtgtgtgtttagaggttacagttgggccaggtgctgtgtgtgtgtgtgtttagaggttacagttggaccaggtgctgtgtgtgtgtgtgtgtgtgtgtgtgtgtgtgtgtgtgtgtatttagaggttacagttgggccaggtgccgtgtgtgtgtgtatgtgtgtgtatttagaggttacagttgggccaggtgctatgcagctcatgcacgtccctgccagctgccgcctcaccttgtggctcatgggggcattcccagctcccactgaaaccacctttgcaaaaattatatcagtgagaaaatgttggcatggaggagagctgatctagccaatcttcctcttgcctttagctttcaagttaccttaattatcactgggcttaggctgagctaactttgagagatatttaggttatagtttaagtaataacatcccttccccaaaactcaaccgcctttggaaagccaatgagagaccaccagagtaagggaggggggaagactgaattctgctaaggtgtagacttaaagattgccagccattattctggaggtcctgcaggtaacattgctattgtggactggccttttgagatatgttttcaggttttttgcatgtctgacacccatgactccacctggacccatccacgatggctcctgtggccctacccagaaccaactcaacataagaggatggtttcaactccctataatttcacctctgacctaaccaatcagcagcaaccattgcataaccacccccgccccttatcccaaactacttttgaaaaacccccaacctacaagcctttgatgagattgatttgagtaataactccatcttttgtatggcgtggctggcctcacgtcaattaaattgtttctttactgccataacatggtctttatttgtgcagcagacaggaagaaacttttgggtggttacaccactagcttctcctgggctgtttgcatgtttttagctcacactgaagggctccagggtctcctgcaaaatgccccatccccacaggccatgagagactgatggaggttccaattcatctccgtgggtgctggcaagacctcccagatccatttgcacttgttcttcttcactttcctttctcaacggcagcaccagcaccaaacataggttccagggctaagctcgactgtcgagccacctccacggttgcagaaggtcaagtccctattttaaaacaaaagcagaagaaatcctcatgccacatcactcctagtgattccaacacctcggattggaccctgtgccagatccaccatctttttctcaatgtgtcctgtacgtccagtccaggtctctggtcacgcatgaatcctgctttcactggacgtttccacttcggtctggttccagttggtctcagtcccttgactccaaattctgaattgtttctttttcagtgttaatcagatgtgctcgggatgccagcacccacccactcaccaggtcagaagtctgggacgtcttgggtccttctgcccccctcaaatccatcacttgcatctccaacagaaaccttggtttgtccacacctgtctctcactgcctccatccccatgccaccctccttagctgccgagcttctgttatctcttccctgttcaagaatgaccatttccttgttgtatctgcttcctcactgcccctttcccatacgttcatcacatacagccaaggtcacctttccaaaaaacatactggccatgagtacattgggctgcctgggaagagccagaccccagcaggaagctgcagaaactgtcaaggcaggcaagacacagacctcctctgtccccactctgagtaggagtaaggagggaggccacagaaggtgagtcagggtgttgccaggggaggctgcatctgcttgtccccctctctctcctctgtctgcctctctaaagacctcacccttctcagggagtaggtgcggcaaggggagaaggcccctgagatgctcgtgaccctgacctgctgggtcagccttttttccctctctggaattgccttttttcttctcagagggtggaggcccttggctttgcctgaaattctttgcttagtcactgaacacataaacctgttccctgtcagtcaccccaggcagagacaaagctatagttcttaagtgctcctgtctgccccaagttcagccagtcagcttcctatcgctgccaattttacctcatttttcttttttctttattttattattattattgttttttgcgatggagtctcactctgtcacccaggctggagtgcaatggcccagtctcagctcactgcaacctccgcctccccggttcaaatgattctctggcctcagcctcccgagtagctgggactacaggcgcccaccaccatgcccagctaatttttgtatttttagtagagatggggtttcactatgttggccagggtggtctcaaactcctgactttgtgatctgcccgcctcggcatcccacagtgctgagattacaggcatgagccactgcgccccggctgtttttcttttttgtgatgagaagctttatttataataaccgcaaactgacaacaacccaaatgttcatcagttgattaaagaagttgttttgtatttttacaatcaatattcctcaacaataaagagtaaactattggcagatgcatcattatgcttaaatccccaaaagctgggtgtggtggctcacatctatcatcccagcactttgggaggctgaagtgggaggatcacttgagcccaggggtttgagaccagcctgggcaacacagggagaccccatctctacaaaaatatttaaaaattagctgggtgtggtggagcatgcctgtagtcccagccacttgggaggctgaggtgagaggatggtgtgagcccaggagattaaggctgcagtgagccatgattgctccactgcactccagcctgggcgacagagcaagactccatgtcaaaagaaaaaaaaaaacaaaacattaaaatgaggtcattatggtgggtgctgatccaataggactgctattcttattagaagaagaggttagggcatgaaaagatcacattctttcaccactttcttctaaacaggcttcctccctcccacccatgacacagctgtgctcaaaatctactatgttgtcagatccaacagtcactcctctgtcctcaggttatgtggcttcactgtggcaatcaagagagttgacctcttcctccttctcaaaaacgctttcttcttgtgccttcatagaccctctatcctgattgtcctggccccaccttcttccagctctccttcttctgcttgtaggtactaaagctgaaagcgtgcacaccctctgaccccgccattcttattcagggagcccagatgaccactccacaaatgtgcactgagcgcggaataataataattgccaatatgcatcgagtgcccacattaggccagtcacgcgccctgtccaggaatgcatttagacgaacaatttatatctccttcacgtttcacagagctgacagtctcatggggccccaattgtcaaaaaagttgagaataagcaagttctcacaagcttgggaaaagatggattagtcagcagccagggaaacggagctatcagaatcagttttaaagtcgtacaactgacccgtggcagcctgcctcagtgaacgcgcctttgcacgccaaacaatcatttggttaggagggactcactctgatacacacgtctctgagtgccaaccaatccacaagggtcccactcgagaaatcacggtcctgcagatgatgtcagccccttgatgtctatgaaagccccacaacctctgaactccacattgccccgaaaccctccataaaaccagaccgttctgcacagagagactgtctggttagcagagctctctctcctttattatggtaagaaatcaattcaggattgttcttttatttcagatattgaattgtgttagcttgggctgccatgacaaagtaccacagaccgagtagcttaaacaacagaaatgtattttctgacagttctggaggcaaaaagtataaggtccgggtgttgctggggttggctccttctgaggcctctctttggctgatatctggctgcctttcccccatgtccttacagggttgtccctctgtgtgtgtgtctgtgtcctggcctcctcttcttaaaaggatagcagcatatggattaggactcaccctaatgaccacattttatttacctctttaaagatcctatctctggccaggcacagtggctcacacctgtaatcccagcactttgggaggctgaggcgggcggatcacaatgtcaggagttcgagaccagcctggccaatgtgtttgaaaccccgtctctactaaaaatacaaaaattagccaggcgtggtggcgggtgcctgtaatcccagctacccgggaggctgaggcaggagaaccgcttgaacccaggaggcggaggttgtggtgagccgagatcgtgccactgcactccagcctggtgacagagcgagactccatctcaaaaaaaaacaaaaacaaaaaaacaaaacccacagataccactgggtgacagttgtctacagtattcaaaacaatagcatcctatccaggtgtgtggtctgggagcaactggctgtcctatagaggctgggtgtgcagtagactctaccaactaggtgtgtgtaagtgcaatctaggatgttcacacaatgacgaaatggtctaacagcgcacttctaagcacgtttagggatgtacggctgtgtagagttcgtggcaggtgtcaagtaagtagaattcttcccaggaaatttttctttttcttctttttctgagacagggtctcactctgtcacccaggctggagtgcagtggcacaatcacagctcactgcagcctccacctcctgggcttaggtgatccttctgcctcagcctcccaagtaactgggaccatgggagtgcgccaccatgcctggctacattttttttttttttctgaggtggagtcttgttctgtctcgcccaggcaggagtgtaatggcaggatctcgggtcactgcaacctctgcctcctgtgttcaagtgattctcttgcctcaacctcccgagtagcttagattacaggtgcctgccaccacacctggctgatttttgtatttttagtagagatggggtttccccatgtggccaggctggtctcgaactcctgacttcaagtgatccgcctgcctcagcctcccaaagggctgggattacaggcatcagccaacacccagtggttatttttatgttatttaacatattctctatattatccaggctggtctcaaactcctgggctcaagcaatctacccacctcagccttccaaagcactgggattacaggcatgaaccaccatggctgtcccccaggaccttattctaaacacagttcagtatttcccaagcattcttgaatgccaggaactaggctgggacaatagtagtgtgcagaacagactagacatctattcagcaatcttgcttctgggtatacacacaaaagaatataaatccgggtctcgaagagatgtttgtacacccgtattcatagcaccattattcctagtagccaagcggtggaagcaacccaatgttcactgatggatgcgtggatgagcaaaatgtgctctatacgtacaatgaaatattgttcagtcctgaaaagaaaaggaaattctgacacttgctacaacatgaatgaaacttatttttttttttttgagatggagtctcgctgtgtcgcccaggctggagtgcagtggtgccatctcggctcactccaacctctgcttcccgggttcaagtgactctctcacctctgcctcccaagtagctgggacctcaggcatgcaccatcatgcccagctaatttttgtatttttagtagagatggggtttaccatgttggccgggctggtctcgaactcctgacctcaagtgatccgcctgccttggcctcccaaagtgctgggattataggtgtgagccaccgcacccggtcttgaatgaaacttttgaaaatattatgctaagtgaaataagccagtcacaaaaagacaaatactgtatgattttacttatatactgtacttagagtagtccaactcataaagacagaaagtaaagtggtgattgccagggactgagggaagtggtgagtggggagttaatgagggcagtttcagttttgcaagatgaaaagagctctggaggcagatggtgatgatggttgcacaacaaggtgaatatatttaacactgctatctgtacggtaaaaatggttaagattggctgggtgtggtggctcatgcctgtaatcccagcactttgggaggccgaggcgggtggatcacctgaggtcaggagtttgagaccagcctgaccaacatggtaaaaccccatctctacctcatctactaaaaatataaactactaaacctcatctactaaaaatacaaacaattagctgggcctggtggcaagtgcctgtaatctcaggagctactgagacaggaggatcgcttgaacccaggaggcggaggttacagtgagctgagatcaagccattgcactccagcctgggcaacaaaagcgaggctctgtctcaacaacaacaaaaaagtttaagatggtaaattttatgttacctgtattgttccacaattaaaaaacaaaacgggctgtgtctctgctgtcatgctcttgttttcctgcacttcttggaggctgcactctcagtagccagacttggagctctggacctcttggcttgaaacatttccccttgccattccttcctgttctgcctgcacttttcaggacacttcctccaaggaggccctctctgatgccttcctcccatccccttcagaatcggggtagccccagtggtggcttcaccagcctcatgagatccagttttgttcatctcttcgcaactccacattcggtgatatcacattgttagcttcaggtcagccacagtgggaatatttacaccatgggaattggcagactctacaaagcatggttttgttcccttgagagctagttgttaaacatttaccagcccaccatggaatggtcaccccttccgtgctgctcaaacatcctgtcctctctgatgtgatgtctgtcttccctgttagatgataagcttcactaaggcaggggccaggcctgtagctggtgagtggtggaaccagggtttgaaggctcaggggatacaggttgaatatcccttatccaaaatgcttgggaccagaggtgtttcaggtttcagattttttcagattttggaacatttgcatttatgtaatgagatatatcttggggatataacccaaatctatacatgaaatttatttgtttcctttttttttttttttttttttttgaaacggagtcatcttgctctgtctcccaggctggagtacggtggcacaatctcagctcactgcaacctccacctcccaggttcaagcgattctcatgcctcagcctcccgagtggctggaattacaggcacccaccaccatgcctggctaatttttttttgtatttttagtagagatgggtttcaccagactggtttcgaactcctgacctcaggtgatctgcccgcgtcagactcccaaagtgctgggattacaggcatgagtcacgatggccggccttatttatgtttcatagacattttatacacatagcctggagataattttatgcagtatttttaataattttgtgcatgaaaacaaagttttgactgtgttttcactgcaaccctttgcaattttcctcgtgtggcatcatgctggcactcaaacatatcagattttggagtatttctgatttcagattttcccattagatatgctcatcctgtaatggccaccctaatttcagtctctctccctggaaatcaacaagacaataataatgatagaaataatagtcagccaggtgtggtggctcacgcctgtaatttcagcactttgggaggccaaggtgggcagatcacaaggtcaggagttcaagaccagcttggccaacacggtgaaacccagtctctactaaaaatacaaaagttagctgggcgtggtggcacgtgcctgtagtcccagctactccggaggctgaggcgggagaatcacttgaacctgggaggcggatgttgcagtgagctgagatcgtgccactgcactccagcctgggcgacagagtgagaccctgtctcaaaaaaaaaaaaaaaaaaagaaaaagaaaagaaataatagtcatagctgttattatgaattgcagcattcctgtattcctgcagaccttttacctttacaaaaaccttaccctagctcagagtcgtctcctcccacctctccgctggcttcttcagccacactgggtttctttctccctctccaacatatttctctccattgtcttctcacttctcggtatgttcttccctcagatctttgcttgactgatcatttaggcttccttcaacttaaatgtcacttccttgaaggggccttttctgagaacctgagctaaaatagcctcggtcaccctccagtaatgtatgtcgtgctgtaagtggcctcatccccataattaacccccagtctttcatgtggacaacttgtgtctcctcaaagttatttataaagcaatatacaaaccggcttcaagttcctttctctttaccctctgaagtccctcctatgtagaaactcctgaggaaccagcaagttccccagttttatgatcttcattaattattttattgtggtaaaaaccacataacataaaatgtaccatcttaattactttaagtgtacaatttagtaatgttaagtattttcacattattatgaatcaggtctccagaactctttcatcttgcaaatcggaaactctataaccatgaaaaaacaactccccatttcttcctaccccattccctggtaaatcaccattttactttctgtttttatgaatttgactcagtaacttcgtataagtgagataatagcatttgtctttttgtgactgccttatttcacttagcataatgtcctcaaggttcagtcatgttatatcacaacacttccttttttatgctgaatactaatgttccattgtatgcatataccacattcccattgtccatttatctgttgatgggcatttactttgcttcaacctcctggctattgtgaatagtgctgttaggaacatggctgcacacatatctctttgagtccatgttttcttttgggtaaatacctagaattggaattgctggatcataaggtaattctacttttaattatttgaggaactgccataccattttccaaagtggctgtaccattttatattcccatcaatggtgcccaagggttccaatttctccacactgccttctttattatttttttattttttgagacagagtcttgctatatcgcccaggctggagtgcagttggcgtgatcttggctcactgcaacctcggcctcctgggttcaagtgattctcctgcctcagcctcccgagtagctgggattacaggtgcgcaccaccatgcctggctaattttttgtactgtcagtagagatggggtttcaccaagctggccaggctggtctcgaactcctgacctcgtgatctgcctgcttcggcctcccagagtgctgggattacaggcgtgagccaccacgcctggcccacattgccttttatactttcctttttttttttttttttgatagtagccatcccgataggtatgagttggtatctcattgcggtttcaaattgcttttctttaatgattaataatgaacattttttcacgtgcttgtttgtcatttgtatatcttctttggagacgtgtctattcaagctctttgcccatttttgaattgtgttatttgatttttttggtgttaagttgttgtagttctgtatatattttcaatattaaccacatatcagatgtatcatttgcaaatattttctcttattccgtaggttgtctttgcattctgtcaattgttgtgttatttaaggcacaaacattttacatctgatatagtcccatttgcctattttcacttctgttgcctgtgcttggtgtcagatcctaaagcatgtcattgcctaattccatttattttaaaaattttcttgtcaggcgcggtggctcacacctgccatcccagcactttgggagactggggtgggtggatcacctgaggtcaagagttcaagaccagcctggccaaaatggtgaaaccctgtctctactaaaaatttaaaaattagctgatcaaggtagtgggtgcctgtaataccagctattcaggaggctgaggcaggagaatcccttgaacccaggaggtggaggttctagtgagccgagatcccaccattgcacttcagcctgggcgacagagcaagactctgtttcaaaaaaaaaaaaaaattatcttgattctgtttgtcagttcccacaccccatttcatccactccaggagaaaacagacatgtcttcggctcccccggacttcctagaatttaacacagtgcccagggcacaagcatgaaacatacttgctgaatgagtggatgctctgttgccgatgtctgacagaatattatttatagcttacacctgactgtccctaggcaaggtctctgaattcttctggtcggcaccagaagggagggacgaagcttccagaggagacctgcctgccactgccctgtgatggggaacctaagggacaggcagaccttggcttttggtcccccagagagctggctctgtactggggctgggaatctccctgatctttgatttgcagggtgaatggggtggaaccttctgcccctccctccattccccctactctggtgtgcaggaagctgaggccttctaggagactggggatactgaggctgagggaggtagggaggagttaggaggtttttgattctcacttgaatctttcccactgtagctgaaaacagggtttttgggtcacctgccccagcaggggatgggagtataggcggggtctgcgtctgcaaccccctcctgaatgtggaaatcttaacggggccaacacctcccccgttgctggatatggaagcaatgatactttctcccttccagctctgcactccttataccccactgggatagaaatcctgtctgttggtgtcaggcaggggtctccggctacccctcctctgctggggtggaagatggagaggtcaaaggagcaagcctccttcctggcccttgcaagggcctccagcctggcagccggagggattaaggacaagaggcccctggcgtccgtgagtctggcgtggctgcccaggagcctcccaggggagtcagcgtgggccagagggctggaggctcccagatcaatcagaggtctgaaggtcactggagctgtgaccttcaaattaggatacttgtaacccaggaggctggcacacccccacgggggatggggcgcatggttgaagagaatccatctcccagagaggtgccctagggcccccctttcaccatgaccctgctaacactttacagatgaaaagcatacctctctctcaccccctaatcttatcgcagtgaattgccctggggtgaaagaaaagcctctggatcccaaacctagaatcactttgaaatactgctgtccccaacggctccctttatagaggccctgggctgcctttgaggtgcatattttgcaaggttgaaagcaggagggagtgaaaaaatgcctgcatttgcctctgaggtgctaaaggaaaaaaatagctcaatgatgatggatgggcagactttatttgggatcaccgcagtgggtacggggaccactgccataggggcttgcggttggttggtgagagaggttgggttaattcctgaatacagcagggagagtgggaattcacagccaaggagcagggtcgggagcagtggctagaaaactgctaagaggaaacttcagagataagggcgattctggttaaactgaccttgctagattcctgctgaaggcagccccgggtgacaggaggaatccaatcagacatcaaaggggatcagatgtcgacagtggagggttccttctaaactcacttagcagggttcttccctgaaactgggtcttagatgggcctagcacaagattcagaagcctgtctaaagtgtggccaagcctgggcgcagtggctcatgcctgtaatcccagcactatgggaagccaaggtgggcagattgcctgaggtcaggagttcgtgaccagcctggccaacatggtgaaaccccatctctactaaaaatacaaaaattagccaggcgtgatggcacatgcctgtaatcccagctactcaggagtctgaggcaggagaatggcttcaacctggaaggtggaggttgcagtgatctgagatcatgccattgcactctagtctgggcgacagagtgagactctgtctcaaaaacaaaacaaaagaaaacaaacaaaataacgtgtggccaagcaaagagtctttgtcagtggatcagtgtctatatgtcaagtcaaaggaatatattgcagataatatagtatcttctgttttcctgaatgatgatctggatgtgtaggagaaaggctttcaccagctttggctgaagggtggttttgtattgcaactctgtcttcgacattcaataaatactgaattcactgtcagtcagtcaatgacttcttggctagtctcttgctagtttattcctaccaagccttacttcactcaggcaaatggcaatggggactctgttgttgattctctagtaagggatggacatctacaataaatttattatagattgtctctttacttacttgtcataaataagattattatataattattgcattacatatttaattatatgttatggataagattattgtaatataatagtaataacctataatgaatgagaaatgtgccccttttgcaaaccctgcacttacttgtctgatacctttcttcttgaatttcatggaatactgtctcattccagtaataagaaaattcacggaagatacaggcatgacctaagtgttctcaccaaacattttcagagtattctcgcaataaccctttgactgggtactttcagagatcctttttattttccacataggaagagataatttgtctaacagctactgaataaacagatccaagatttgaaccctcatagtttggatgggaatctgagttctttcttttttgtttgtttgtttagacaagctcttgctgtattgcccaggatggagtgcagtggcacaaccaccactcagtgacaccttgacctcctgggctcaaacaatcctcccgtctcagcctcccaagtctcagcacacctgggactacaggtgtgcatcaccacgcccagctaattttaaattttttgttagagacgggtacttcctatgttgctcaggctggtcttgaactcctgggctgaagtgatcctcccacctcagcctcccaaagtgttgggattacaggcatgagccactgtgcttgaccaacccacatctcattcagctcctgcaccatttctcttctcccccttagaactaactctatagcctcatctttacttttgcatttctctatctctcttaacctcattccaatcaagctttcatctataccattttactaaaaggccaccaataatctccacattggcaaatccagtagttgagttccagctgtcataaggacttgacaatttgtcacctgtccttcttcttccttttttttttttttgagacagagtctcactctgtcacccaagctggagtacaatggcatggtcttggctcactgcaacctccacctcctgggttcaagtgattctcctgcctcagcctcccaagtagctgagattacaggcgcacactgccatgcccagctgatttttgtatttttactagagacggggttttgccatgttggccaggctggtctcaaatcccaacctcaggtgatctgcccacctcggcctcccagagtgctgggattacaggcattagccaccgtgcctggcccaacccgtccttcttagaagacttgagtccacactgaattgggttcaccagacctccctgacaattctctcttctggctttcttcctacctcccctgttgctggatatggaagcaatgatactttctcccctttccttctctatactccctataccccactgggatagaaatcctgtctcttggtgtcaggcaggggtctcaggctacccctcctctgctggggtggaagatggagaggtcaaaagagccagtctccttcctggcccttgcaagggcctccagcccgacagccagagggattaaggacaagaggctcctggcatccctgagtctgaccagattgtagtagccagcctccaaagtggcccgcaataatcctcactccctagtagtgctcacagtcttgtggtctcttctgacaccgacccagagctggttcatgaccagctgaggctgagggaagtgtgaagggagagtctaggaagtttttgattctcatttgaacccttcccattgcagctggaaacagcagaacatggaggaagtgatagtgtgtgtgacttctaatgctaagtcataatggacatcgtagtttccacttggatcacttgcttgggagtaggggtaggaattcagccaccatgttgtggaatactcaagtagcccctggagaggtccaggtgcagaggaatcagcttgccagcaccaacttggcaaacttcgagtgagccacgtagattctccagccccagtcaaaccttctgaccacctcatgagagaccccagaccagaactgcccatcagagctgtttccaaatccccaactttcagaaaccataaaagataataaatgattattgttttaagttaatacatttttgcatgatttgttatgcagcaaattgctaaccaatacatattctttctcatattcctttccatgtttttctactatcatgtctcaattctagagtgctccagagttcagtgctcagatcttgtctaccatctggatttgatacctaaatgatcccacacattgctaaactttgcaatagcatctatatattgttaaatctcagatttatagctctagctcaacatctcccatgaattccatcaacccactgtttataggaaatttccacttagatgtcttatagtactttccatcttaacatagctacgagtgaacacctcatctcacctcatccctgacacagctacgtaccctcagtctgcccatctcagtaaatgacaactccatcctcccagctgctcagacctaaggccatttttgattcacagctctgcatatccaatccatcagcaaatcctggttggccctcaatatgatagtggcttggacaataatactgattagattcaggaagaatgttccaggtgaatgctcagaggtagaaccaagcttatgttctccagaaacttcaaggaggctgtggtgggctaaatgttgccttcccctaaaaagatacatccatgtcctaatcctaatattcagagcctgtgaatattgctttgtttgaaaaaaaggtggggaggtgttgtgggagatatgattatgattaagttaaggttcttttgttttttttttttgagagacagggtctcactatgtcacccaggctgagtgcagtgggacaatcacagttcactgcagacttgaccttccaggctcaagcgatcctcctgcctcaacctcccaagcagctgggactacaggcatgcaccaccatgcctggctaattttttttttttttttgagacaaagtctcgctctgtcacccaggccggagtgcagtggctcaatctcggctcactgcaagctccgcctcccgggttcacgccattctcctgccccagcctcccgagtagctgggactacaggtgcccaccaccatgcccggctaattttttgtattttttagtagagacggggtttcaccatgttagccaggatggtctcgatctcctgacctcgtgatctgcccaccttggcctcccaaagtgctgggattacaggcgtgagccaccacgcccggccctggctaatttttgcttttttgtagagacaggtctcactgtgttgcccagactggtctcaaacctgaggatctcaaagcgatcctcatgcctcagcttcccaaaatgctgggattacaagtgtgatcaactgcacctgatcttttaccattttttaattgtggtaaaatagacattacataaaaatttccatcttgaccatttatttacagacacagttcaatggtattaaatacattcataatgttatgcaactgtcactgccacccatctccagaactcttttcatctgtcccccaactgaaactctgtccccacgaaacactaattccccatttcctcttgttcccagcccctggccaccaccattttactttctgtctctgtgaatttcactacttaaggtatttcatgtaattggaatcctacagcatttgtctttttgtaactggctcatttctcctacaatgatgtccttagagttcatgcatgttatagcacatgtcagaattatcttcctctttagggatggataatattccattgtatggatggaccacatttttcttacccatttatctagcagtggacacctaggctgctttcacatttaactattactgtgaaaaaatgccattgtgaatatgggtgtgcaaatatcactttgagaacctgctttcaattctttgaggtatatactcagaagtggaattgctggatcatattgtcattatattttcagattttttttttttgagaaaaagtctcactctgttgcccaggctggaccaaagtgtcatgatcatgactcactgtagcctcaactttccaggctcaaacaatccaaccacctcagcctccaagtaactcggactgcaggtgcatgcagctaatttttaaattttttctgtagagatagggtttctccatgtggcccaggctggtcttgaattcctgagctcaagtgacctgcctaccttggcttcccatagtgctgggattacagatgtgatccacaactcccagcctttttttttttttggccagtttaataggtgacgaatagtatcctattttcttagttcacattttgaaaaatgagcaaagttaattcacctttaaaaattttgtgaggccaggcatgggggctcacgcttgtaatcccagcactttgggaggctgaggcagggcggatcatcggaggtcgggagttcgagaccagcctggccaacatggtgaaacctcgtctctactaaaaatacaaaaaattagctgggtgtggtggcacatgcctgtaatcccagctactcgggaggttgagggaggagaagagcttgaacccgagaggcggaggttgcagtgagccgagatcatgccactgcactccagcctgggcaacacagtgagactctgtctgaaaaagagaaaaagaaaaaaagaaaatgtttgtttcctggcagaaacaagggcagaatctgtctggaggggtataacctaacctagggcatacaggattcccactgataaaaccctagtaaagataagcccacaatccaaaactgcaaacaatgaaaagtccatcctgaatgagggttagtagaacaatcaaacagcaggattagatccccaggaattgcagctaacagaacttctgccagtcatgcattcacttatttaacaaatatttattgagcatgtgctaggttccaggcagtattttagatactttgggtacacaagcgtacaaacagtttacaagtcctgctctcagagagcataattccaacactggatagagactttataaaagaaagttattggaagatcattatacatggtatgcttgtatcacatgtaccccataaacgtgtagaactattatgtatccataaaactttaaaataaaaacataaatatattcaaaatgatccaagacaactcaacaacagcaaaacaacttgatttaaaaatgggtagagaagttgaatagacatttcttcaaagaagttatacaaatggccaaaagcacatgagaagatgctcagcatcgctaatcatgaaggaaatgtaaatcacaacggcagtgagaagccaggcacggtggctcctgcctgtaatcttagcacattgggaggctgaggcaggggaatcacttgaggccaattgtctgagaccatcctgggcaataaagtcctgtctgtacaaaaaaaaaattttttttaattaaaaaattagccaggcatggtggtgttgcctgtagtcctagctacttgggaggtgaggtgggaggatatcctgaacctgggaagtggaggctgcagtgagccatgatcgtgccactgcactccaggctgggtgatggagcgagaccctgtctcaaaaatttatatatatatcacaatgagccattaggttgtggctatatagatttttaaaaggcagaaaactacacgtatatatgagaatgtagggaaattggaatcttgtgcactgttggtgggaatgtaaaatcatgcccctgctatggaaaacagtatgatttaaaaaaaaaaaaacgtaaaaatagaattaccttatgatttagcctttccactcttgggtttataccaaaaaataaaaataaaaacaaaagttgaaaatggactcaggaaacgggtatctgtacacccatagcggcattacacccaataaccaaaacacagacgcgatccaatgtccattgacaggtgcatggataaataaaaatggagtctgtctacataaccgaatattattcggccttaaaaagaaggagattcttatacgtgctactatatggtaaaccttgaagacactattctaagtggaataagccagttacaaaacgacaaatactgtaagattccactcatataggtatctgaagtagttaaattcatagaaacaggccaggcaccgcggctcacacctgtaatgccagcactttgggaggccgaggcggatggatcatctgacgtcaggagtttgagactagtctgactaacatggtaaaaccctatctctactaaaaaatacaaaaattagtcaggcgtggtggtgggcacctatattcccagctactcaggaggctgagacaggagaattgcttgaacccaggaggcagaggttgcagtgagccaagatcatgccactgcactccagcctaggcaacagagtgagactctgtctcaaaaaaaaaaaaaattcatagaaacagaaagtaaaataatggttgccaggggctatgggtaaaggagaatggggagttactgtttaatagttctagagtgtcagttttgcaagatgagaaaggtctggagactggtcacacaacaatggggatacacttaataactcgtttaagatggtacattttatattccatgaattttaccacagttaaattattgaagacataaaaaaaatccaaatatttgaaaacaacaagacataataaaatatcggggatattgaaaaaaaaacctttgttttctagaaataagaatttagtcagtgaaggtgttaaccaggagattagagccatctaatgagataattagtgaactggaaaatagatttaaggaaaccatgtagaaggtggccagggaaaataaagaaattttaaatatgaaagaagttaagagctgtagaagatagaatgagaattctaacatatgtgtatgtaatgcatttcaatttttttggctgcaattgagagaaaccggttaaaatgggctccagacaaaatgatgaagggagatagcttttattgaccccagttacagtcagatccaggtgttgaaagctccttcgccaaattctgctgctttcctgttctctgctttgctttaatctctctcggcctcatcctcaatcaggatcttcccaaccagtggcaagtttgctactagcagtcacaggtttccctcctttccagcttctcaacccaattaggaaaagtaacattttttgttgttgtttgtttgtttgttttttgttttgttttgttttttgagacacagtctcgctctgttgcccaactggagtgcagtggcatgatctcggctcactgcaacctctgcctcctgggttcaaacgattctcctgcctcagcctcccaagtagctgggattacaggcttgtgccaccatgcccggctaatatgttttgtatttttagtagagatggggtttcaccatgttggccaggctggtctcgaactcctaagacttcaggtgatccacccgcctctgcctcccaaaatgctgggattacaggtgtgagacaccgtgcctggcctaaaagtagctttttctcaacaatttcagcaaaagtcgcagttggggctagcatagccttacttagattctgtggccatccctgaacaaatcactgagaccaagaggacgtgctgctctcctgggccagacctgggtccttttccctttcctggagtcagcagggtgggctcagccctgcctgaaccatatgaaaagagagccgagaaaggagccatctcagaagaagcccagtgaagacttggcaggcgaaagtggcacacggggctgggaacatggtagctatggtaagaaaagcaagggacgcgcatgtgttccgatagtgaaatacgcatatcaactgaattcacatccacgtttgtgttttccctcttctctcacatatgtctagtgcagtagcaaatatttttgcctgcttctttctattcaacattcaggaaatgaggctattcttagctcactcttatttggggctttcgaaacatgagacacaattttgtgtattttgcatagattttcttactttaccctgaccacaattctgtaagtccatatgcttttatttttatgttttattttatttttaggttttagagatgggggtctggctctgttgcccatgtggagtgcagtggtgtgatcacggcttactgcagccttgaattcctgggcacaagtgatcctccaactacaggtgtgtgccaacatacctggctaattttgaaaaaattttgtagagacagggtcttgcccagcctggtcttgaactcctggcctcgaacttctggcctcaagcaatcctcccatctcagcctcccaaagtgctgggattacaggcgtgagtcacctgacatgagtcacccagcaggtcatacatttcaatcataattttcacttcactgatgaagaaactgaggtgcagagattaaataacttgttcataggcacacaaaagttaattatggagatgtaattggaactgaggcagtacaattccagattccatcccttaactgccgtagtctgtgctgtgtctctggaattcaattcattttgaagataactctcatccagcaatgcatgacaaagtggaaatgtcccctcagaagtagttccctttggccgggtgcggtggctctcacctgtaatcccagcactttgggaggctgaggcgggcagatcacgaggtcaggagatcaagggcagcctggccaacatggtgaaaccccatctctactaaaaatacaaaaattagctggggctggtggtgcgtgcctgtaatcccagctacttgggaggctgaggcaggaaaatcacttaaaccagggagttggaggttgcagtgagcagagatcgtgccactgcactccagcctgggcaacagagtgagactccgtctcaaaaaaaaaaaaaaaaaaatagaagtagttcccttaaatggtaccaatttgcacattagaatcaatttgttcagtgtgtacgaagcccgtgactttaatggtggtttcctctgggtggtcctagaagactatcctggttacaaaagaaagaagccccatttacttcacctcataccccatgaccaccccacacccataagggttttcagtcagcagacatggccactccatggagcagctggggcaccgctggtctcagagggttgaggatgacagaaacaactcgaactggtttcggcaaagaggggggatttcttggcttaggtaaccaaatctgagggagggaaggggtgtagttgtcttcagggtgatggaatgcagccagcagctgtctctctaccacttgagtctgcatgttggtagtgagctgtcatgcaaggcttccccatgaggtcagaatggtgctattctcaggttatccatctgcaaggagaagacctgcctcccttgtccttagaaggctcttcaccagcctggcttgggtcacatgcccactcccatggccaaggcacccagcatactacaataggtgacctttgtggggatacgggtgagaagaagcagtccctaaaataaaagccagggtgagttttcccgaagcagcagggaggagtgccacacagatgaacccattcatacccaccttgcaccacatcctgtgttgtggggtcttaggaactccttcctggaagaaatagcctgtgtgacagggccttgaaactaagcaggagcttgctgaaaagaggaatgagaggggccaggcgcagtggctcacacctgtaatcccagcactttgggaggccaaggtgggtggatcatgaggtcaggagttcaagaccagcctagccaacatggtgaaagtccgtctctactaaaaatacaaaagaattaactgggcatggtggcgcatgcctgtaatcccagctactcaggaggctgagtcagaagaattgcttgtactggcacccagtaggcagaggttgcagtgagcagagatcacgctgctgcattctggcctgggctacagagcaagactctgtctcaaaaaaagaggaatgagagaggaacgagcatttggcagacatgcagaggtctacagatgagtagtttattctgactggcccgtggaggcggtggtggtggaggtgggtaaggtgaagcatggctgcaggggaggccacagggaactccacaaggcctgaacctgacctcgaaggtgcatgtgtaccttggatgggtacagtggatataaagttttgctcacccggtgttcactcttttatgaacaaaatacccttttccttttggagagcaccctctcccaccctctcagtccatggagcctatgaggcctctctctccagctcctgtgacctctacctggtcaatagaagtcactggctcagggatggacatgtgacccaatctgggccaatgaggggcagccctaggagttttgctagaaggattgcagactattcctgctagcaaaataagaccaatagatctctaattttttttttttttttttttttgagactgagtctcactctgtcgcccagtctggagtacagtggtgcaatcttggctcactgcaacctcctcctcttgggttcaaattatgctcgtgcctcagcctcccgagtagctgggattacagtaatggaccaccatgccaggctaattttttttgtatttttgatagagacaaggttttgccatgttggctaggctggtctcaaactcctggcctcaagtgatccgccctctttggcctctcaaagtgctgggattacaggtgtgagacactgtgcctggcctctgataaaaatttttggggggttgagtccaggtacgcatgaagccaactacccctggacttttcaactacatgattcagtaaacaacttttatttttgtttgtttgatttcgctttagcaatcagcatttctgttgcttgtcatggaagagatgtctctaaacaggagactgatggagttagacttgtgttttggaaggatgtccttcttgggatcggagaatggtatggaaacagcaagcaagagtggagacagccaagcagtgaagaatcaagggcggggtggactagagccatgtcacctgggggatatatcagtgtgagagatgagaaatggatgcacaaaaatggaaaacaagagagatgtggggactcatttatgggcagacgttgatctccacaagacatggtgactatttggatatggagaatacagaagagggatgagtcagggattacttgacaagggcccaggagaggggctttatctgtcatgcctatttcagatgtaagtgatgaaaaataaactcaaattggcttaaacaaaataaataggaatgtaataggctcaacatctgtcaagttcaaggagcttcagtacagttggatccagaacttctaatgattttatcaagatatgacctttatgtctgtgtttccttttttttttttccttgagacggagtttcgctcttgttgcccaggctggagtgcaatggcgccatctcggctcactgcaacctctgcctcccggcttcaagggattctcctgcctcaacctcctgagtacctgggattacaggcacccaccaccatgcccagctgattttttgtatttttagtagagacgaggtttcaccattttggttaggctggtctcaagctcgtgacctcaggtgatccacctgccttggcctcccaaagtgctgggattataggcgtgagccgccacgactggccatgtctgtgtttctcagacctgctttcctctgatgtggtttcatcctgccacaggatctcccctcaaaaaggtaaagatagctgccaacatctcagcacctgggtgctaccagctaagagacccagaggaaacagaacacttctatctcaatagttccaccaaagttccaggcccaaccatgagtcaattcctgagatgctgattggtcagacctgggacatgtgtccgttctcacatcaggaagtgatgtgatctccacttacactgcacaggctgagagtggggttggtctggatccccaaggaaaatagaaagtgctagaatcagaataaagggggaatagatgtggggtgggaaaaccaacagaggctcacttcagtgtgcatgggatacatttctgagtaatatgggagggtggtttttgtctagggatctacagaatgtgtgtttgtgtgtggggtggggatgaagggttgtctttaaggagcccagcagcattgaggattggtctgggatggaggcccagggtttggaggcctggatttggctgctattttacattttattttattttattttttgagatggagtttcactctttcacccaggctggagtgaagtggcataatcttggctcactgcaacctccgcctcctgggttcaagcagttctcctgcctcagcctcccgagtagctgggactacaggcacataccaccgtgcctggctaatttttgtatttttagtagagacagggtttcaccatgttggccaggctggtctcaaactccttaggtgatccacctgtcttggcctcccaaaatgctgggattacaggcgtgagccactgctcctggccttggctactattttagatagggcagttgggaagagcctcttttaggagatgacatttaacctgaactccgcagggtgaaaagagcttgtcttcatcttcatgagggtaagggggatgatttagaggtaggaattatcttgggatgatcaaagaacaaaatgatgactggcgagacgagaacatggtgcacagtggggagccgggaggcaggatcttgtgggcttagtcagttcctcattgaacactagtatggaaagccatgacaaagtgttaagcagaatcagtaaagcacagtgtcactcgacctttgaggattaccagaaggaggacaggccaatcgtaagcctgatcaagagaagggaaggaggaaggagaagggggaactttctctgtcaccttcccgccctgttgaggcagttttcatacgttggatgtttaacacaacccaaccaagactgggacccggtgcagtggctcacacctagaatctcagcactttgagaggccaaggtgaaaggcttgagcgcaggagttcaacactagcctgggcaatatagtgagaccctgtctttataaaaaaatagaaaaattagccaggcatagtggtgcatgcctatagtcccagcaactcaggaagctgaggtgggatgatggctcgagcccaggaggtcaaggctgcagtgagccatgatctcaccactgcaccccagcttggcgacagagcaagaccctgtttcacacacacaacacacacacaaagattggtatggtcactcttactttactgacaagaaacctgcgtacagaggagctaaaccaccatcccaaggccataaaactactgcgagtctaagccaggatatgtctgaatatgaagactcctctgaatgctgggtcccagaagcactaagcttggttatgaacctcatgggctctacatagcttctcaccaagttgggtcctgttgagcctattgtgcaaggaaggagaccaaacaccctggaggtttgctcacctggcctgagttacctggccgtggaaggcccctgggctcaagttccctgagaggcaggggttaaaccatgtgtcctagaacctcagcttgcatcccaccctggaattttcctctgagttgcaaaatcaggcaagctgccaagccatatatacattgccgggtagccaggcaacaccgtgctttttctgggaaggagcacaatgtggtcactgtgctgccgacgccaggttccagatggaagaaagactttaatccccagcttcacggctgtttggcacacttcgctcctgaaagcctgctcgggccagttttcactctgactctccagtgaggccattttgtctcattccgtttctgatgtttaaatgttaatcctttacaagttggttttagtggagtaggaaatggcggagaaggctggaggtggattcagatgcaacagggatggcacttacacctttcgatgaaaaagacgtgtgattccgcgattttgcagttgtgaattgtgctgctatacgcatgtgtgtgaaagtatctttttcacataatgacttcttttcctctgggtagacacccagtagtgggattgctgggtcaaatggtaattctacttttagttcgttaaggaatctccacactgttttccatggtggctgtactagtttacattcccaccagtagtgtcgaagtgttccctgatcacaacatccatgctaacatctactgttttttgattttttgattatggccattcttgaaggagtaagggggtattgcattgtggttttgatttgcatttccctgatcgttagtgatgttgagcattttttcatatgtttgttggccatttgtatatcttcttttgagaattgtctattcatgtccttagcccactttttgaagggatttttttttttttttttggttactgatttgtttgagtccattgtagattctggatattagtcctttgtcagatgtatagattgtgaagattttctcccactgtgtgggttgtctgtttactctgctgattgttccttttgccatgcaaaactcttcagtttaattaggtcccagctatttatctttgtttttattgcatttgcttttgggtttttggtcatgaaattcttgtctaagccagtgtctagaaaggtttttccaatgttattttcgagaatttttatagtttcaggtcttagatcaatcaatgagtgaataaacaaactgtggtatgtatatatatacgatggaatacttctcagccataaaaaggaatgaattaacagcatttgcagcaacctggatgagattggagactattattctaagtgaagcagctcaggaatggaaaaccaaacattgtatgttctcactgatatgtgggagctaagctatgacggcaaaggcataagaatgatacaatggactttggggacttgaggggaagagagggaggggggcgagggacaaaatacaacaaatatggtgcagtgtacactgctcgagtgatgggtgcaccaaaatatcacaaatcaccacaaagaacttactcatgtaacctaataccacctgtaccccaataacttatggaaaaataaaataaaataataataaaaaaagaaaaaatgtgtgagcaaaatgattaataggcaaatgatagaagaaaaagaaaaagcccatgaagttagaaagagaggcatcacttctcgagtgaacaggaaatggaaatcaggaccacataatgtcaagtttaactctcagagtgatgtaaaaatgaaaatcctagggctgggcatgggtggctcacacctgtaatcccagcactttgggaggctgaggcaagtggatcatgaggtcaggagtttgagaccagcctgaccaatatggtgaaaccctgtctctactaatgtgcaaaaattagccgggggtggtggcacacatttgtaatcacagctagttgggaggctgaggcaggagaatcacttgaacctgggaggcagaggttgcagtgagccgagatcgcaccactgcactccagcctgggtgacagagtgagactctgtctcaaaaaaaaaaaaaaaaaaaaaaaaatcctgataaaggccagtgttggtgagggtgggcagagtaagtgtctgctgtcatacgtggcaatgggagacatttagggtatgacctctctgaggtgattttatgggacttgccaacattttgactatgtatgacccccccaacacagcaaatgtgtttccactaattaatcttgcagaaatactcagagaagtgcacattttaaggcgagaattgcaaaatattggagattctctgtctatcaatatagaaatggtaaaataaatggtgttgcatccataccattgaatcttttgcagaaaaggttgatgcagagatgtgtgtttcagcataggaggttgccttgcctgggacatactgttgggtcaaatagggaaaaaaattaagttagtgaatgatatatagagtctgaattcaattctgttgaaagagtatatatgtatatatatgtttgtatttacttatatttttaaatacaccaagaacatttctggactttgtattttttttttttttttgagacagggtcttattctgtcacacaggctagagtacagtggcacaatcaccccctgtggtctcaatcaccgcctctggtctcctacctcagccccttcacctgtggagtagctgggactgcaggcgtgcaccaccacgcctgttttttttttttgttttttttttttgtaatgatggagtctcactgtgttgcccaggctggtgtcaaactcctggggccaagcgatcctcctgccttggcctctcagaatgctgggattataggtgtaagccaccatgctcatccagaaaaataaaatattaatactggccatcattttaggattaaaaagttgtcaaaaatgcactgttggttcaaaaaacaacaaagggcaagttgccatgctgtatgtagaatattattttatgtctataaaaaagacactgtgtgtgagcatgcatgtgtacacacaaacacagatactatatatacatcctttgtacaaaaatttagagaaggtaaaagcaagaaaaccttgctagtgattggccctgtgggattgggagaatatttttgcttttttgctttctatatttctatatagtttgaagtttctcaaaggttgcatttttttaatttaaaaaaattatttaaaatacctttaagaaactgccatagtcctactaccctaacaggagtaattttagcaattttctgtatgaatctctccctctctatatatatctttctttctctatacccccatctatatacacacatatacacctacccagtaagtgagttgttatcccttaaaccccctcccatgggagagtccccccttttctgagtcatcagtgtccattataccactctgtgtgcctttaggtacccatagcttaggtcccacttataagtgagaacatacagtatttggttttctgtctcagttacttcacttagaataatggcctccagctccatccaagttgctgcaaaaacattatttcattgtttttcatggcttagtagtatattccatagcatacaaatataccatattttctttatctacccattgactgatgggcagttaggttgattccatttcttcgcaattgcaaattgggctgcgataaacaaatgagtgcaggtgtgacttttatataatgacttttttttttttttttcagatggagtcttactccatcacccaggctggagtgcagtggcttgatctcggctcactgcaacccctgcatcccgggttcaagtgattctcctgcctcagccttccaagtagctgggactacaggctcccatcaccacgcctggctaatttttttttagtatttttagtagagacagggtttcactatgttggccaggctggtctcaaactcctgacctcatgatctgcccacctcagcctcttttcctttaggtagatacctaatagcgggattgctggagggaatggtagatctacttttagttttttgggaaatctccatactgttttctataatggttttactagtttactttcctaccaacagtatctcagcattccctttttaccacatcccctccaacatctattggtttttgactttttaaaaatggccattgtaattgaggtaaggggtatcccactgtggttttaatttgcatttccctgaacttctttttttttttttttactttaagttctggcatacatgtgcagaatatgcaagtttgttacacaggtatacatgtgccgtggtggtttgctgcactatcaacctgtcatctaggttttcagccctgcatgcattaggtatttgtcctaatgctctccttcctcttgctccccagcccctgacaggccctggtgtgtaacgttccactccctgtgtccatgtgttctcattaaaacttcttctttttaaaaacagttttgctgaggtaaaatgtcatcaaatagactctgcataaagtgtacaatttggtaagttttgacatctgtctgtacccgtgaaatcttcaccacaaccaaggtagtgaacgtatccatcaccctcaaaaatttccttttggccaggcgccgtggctcatgcctgtaatcccagcactttgggaagccgaggcaggtgcatcgcctgaggtcaggagtttgagaccagcctggccaacatgatgaaattccgtctctactaaaaaatacaaaaattagccaggcgtgatggtgggtgcctgtaatcccagctacttgggaggctgaagcaggagaatcgcttgaacccggaaggcagagcttgcagtgactagagatcccgccactgcactccagcctcggtgacagagcgaaactccatctcaaagtcagcagcaagaggtcaggagtttttactccctcttcaatgttttattcccaatatttagatcagtgcctggcatatagtagatagtcaaattgtaatttgaataaatcctagcttccttttgctacaccaaggcccacagctcctgctggtagctttacactaagaacgactgcggtctgccaagatcatgtgtgcacgtgcctccgggcagctgcatccaaggacgtgattaactgctaagcccccctggatctatgcattccttggtcagcacattttcttcccagtaaagaggctacagacccagcaatgttatgtaatccccaccacaccccatgtgagacaaatcctctaatcatttcagatgaaagatttgaagcacagagccattaaggatggatcaaggttggacatgaaattggcgtggttttatgcagtggatggtaaccaggacccaaaataggattcaagagaagtctatttgggggtggagcagtggaggcaggaacccaaatataagaatgtcatgctgtgggccatcagtcaatggcatttggggtctaggggtgagagaaggatctgggctacagctggcgtaccctgatggcggctgggcctgtggctgtggctgaattatctcagaagaaatgaattacctcagaaatgataaaggaggattaggaccatccacacccttggtggaatgcctgagctctggtggaagcaatatctgttcagacggatctcagctcagtacgcaagaaaaacccaccacaatggcttcaatgagtaagggatttatttttcttctgtaactgggggtggactgtcatagctcactgacttcatcagggattcaggctccttttttcttactctctccgcctttcatagcacacggactttcataacacacagacatcttcctcatggctgcaaaacggctgtggcgcttccaggcatcacatccgtgttccaggcagaaagaaaggggaaagaccaaaacccttctccttacaaagctttgctttttatttgagaatggatggcaaaaggattttcacccacgtcccactggccagaactgtctcacttgccccatttatacagctgcaagggtttctgggagaaaatatttttgactgagcacattgctgctgtggacagaatcagaggttgttaacattaaacaagagagagagtggaatgcagagcaggaaggcaagcagaatgtctggcacagtcagtagcaaagtgaggagagagcttcgagaagaggggtctaagcaggatcctggaagtgaggtgggtctccagagggagtgctgaaggtattttcatttcaggaggcaagatctggaggagcgttgggaagggaatcgaaatagctctcaaatgccctcactgccacccactaatggagacatgatcgttccccttctgcagatggcagaatgaagtcttacagacgctaacaggcccttgtcactgtggtaacttcctgaagcatttatatacttgaataagtagtcaatacacgtgatacaaaccttttatttaaagcacaaaagaatacgtattagtgaattttccttcccatcgctgtgtcccagctctcttccctggaggcaacgacggctaacagttacagttgatcttcattatttgcagattctgtgtttgcaaatgtacctactcactaaaatgcatttgtagcccctgaatccatatgcacaatgttttcatagtcatttgtggatgtgcgtagagccgtgaaacattcgagaccctcactgtacaggttcccagagaaggtggaccgaggtctccgccttcttgtctcagttctcatattgtaaacaactgtccttttggccgtctatttagtgccacattttttgcactttggttggtgatttggctgttaaaaatggctcctaagcatcgtgctgatgtgccgtctggtgtccgtaagcgcagaagctatgatgcgtcttatggaaaaaatctgtgttagatgagctttcttcaggcacgagctatagtgctattggccatgagttcaatgctaatgaatcagcaatatatattaaataaggtgtctgtaaccaaaaactcacataaagcaaggttttgtgtgaatcggttgatgaaaatgcaggaacctgagtgtgttaaccttttttttttttttcattttctgtatttgtgatgctttgacatttgagaatgtgctgatcccagagagcctgcctcttccagggccagccagttcctagagattgaaacagtaacctaggagtgcacctctctcatgcaaaccggtcagtctggaaaccttccttcaaaccacatccttcaactaccacctttgtggggctcccacaagtgacccacatcccccatgccctagtattgcctcaagtccaggtaccagacaactagtggcagctacaccctggagcctgctgaaattattccaatttgccaatctgaaggctgcctacccccaactggttccttcccaaggagaccataataaagtcctgtgccttcctttctcctcactcctctgtctcccggccaaccctggtgcttccccatgttcccccatgtggcatgctgtgcctctgggttccagggatctgtgtctatgaatctgttccttcacaacaatcatttctgtgcctgcctttttttttttttttttttgagacaagagtctcactctgtcacgcaggctggagtgcagtggctcaattttggctcactgcaacctccgcctactgggctcaattgattctcctgccttagcctcctgagtagctgggattacaggtgcccgccaccatgcccagctaatatttgtatttttagtagagacagggtttcaccatgttgaccaggatgatctcgatctcttgaccttgtgatctgcctgccttggcctcccaaagtgctgggattacaggcgtgacaatttttgtatttttagtagagacagggtttcaccatgttggtcaggatggtctcgatctcctgacctcaagtgacccacccacctcggcctcctaaagtgctggaattacaggtgtgagccaccgcgcccagcctatgcctgtcttaccatgcctgattataccaaatcccaggaacatttcaacactgaccctgtatattccctagaagcaatggttccatattgctaattcagtgtccacagtgacgttatagaacacatagctaccctgaataatcagaatcgactgtttgtatttatccttccagagatgttctggacctgtgccaggtaatagatttctttctatttctttttttttcaccacataaatgtatgcacattatagatgctattttgcatgttgatttttttaaaaaattgacaaataacaattgtatatttccatgggctatagtgatgttttgatacatataatgtatgatgatcagatcagggtacttggcatatccatcacataaaacattgatcatttctttttttatttttatttttattttttgagacagggtctcactccgttgaccatgctggagtgcagtggtgcaatctcggctcactgcaacctccgtctcctgggttcaagcgattttcctgcctcagcctcctgagaaattgggactacaggacaggggcccaccaccatgcctggctaatttttgtatttttttagtagagacagggtttcaccatgttagccaggatggtcttaatctcctgacctcatgatccgcccgcctcagtctcccaaagtgctgggattacaggcatgagccaccgcacctggcctatttttattttttgagacagggtctcactctgctgcccatgctggagtgcagtggcacagcgatcacagctccctgcagcctcgaccttccaggtgcaggagatcctcccactgcagcctcacaaatagctaggactacaggcacatgtcaccatgcctggggattttgccatgttgcccaggctggtcttgaactcctgggttcaagcaatctgcctgccttggcctctcaaagtgctgggatcacaggcttgagccaccacacccagctgccacaatgatcatttcttactgttgggaaacttcaatatcctcttgctagcatttggaaatgttatgttattgttcactgtagtcatccgcagtggtatagaacactagaactcatccatcttgtctgcatcctagtttttaaacctaaccatgtgtcttggtgattgcccactgtgttagcttgggtcttccgagaagtaggcgccaaaacaatattagatgtgtaggggatttattagggaaaagatctgtaagggaaaatgaggaatgagctggaggagtctggaaaagttattgaatttggatgccaccacacccgaccctgttatcactattttaaccctaacttgtacaccaccaggagttccagtggcagtttgctttgtgaccagtttctctctttcacaatcaccacaggctatggatccctggacatctttctagtccttggcaatctctctcttccagtaccaatccacaggcattccatctttcccagggtgaacagggctatccaattaattccccttcttgcaggacttggcattatagcccataggggaactggaattgcctccttaacctatagccagctctcgaaggaaatagccaacaacattgatgccatggcttgaaccttcgcaactgtgcgagaacaaatagactctagcagctgtagtcctcagaaatcattgaggactagatatgttaacagcagcacagggaggaatttgtttagccttagatgaaaaatgttgcttttgggtaagtcaatcgggaaaagtacaagacaacatcagacctggacggattcgctgctggtaacatacttggcccatattttgcccataacagcctggcccagggctgggtggtcgagtagacaggcctcgggtggcaaactgcagtgctgggaatcggaccagttcacctgattcccggggggctgcctttggtattctgaacacgccgccaggcacaaagcgctggatgttgggtgtctcgttcacctctcactgccttctacggatttcaacacatagcatcatgatgggaccacagctctgagaatgacagaagcaccgatctccatatcacatgactcctgagtagaggaaaatggatttgagctaagggcaggtgaattaaaaagttggtgcaaatcaagacaaagcagtttgattgttaacacatggcccagtttccgaaggcaaactcagctcatcagcctactgtgggattttcccctaggctgaaaagccaggtttgattccaataaacgtatacattgcagtgtaattaggcaagggaacagggttcttggagccacaaagccccatggtcagtatttgggtgacatctacttcctgactgtaaacagatttaaatataccatctgttttgcagatatttctcagaacctgtttttaatcagtttttctctctaattttcggatactgacaatcttgttttctttttctttatgtgttttaaaaaatgacataaaccagtattgcttttatttttttcatgtgcttggcttgattattttaagctaatttatataccttcattcgttccgtaacagccaaaagtgaaacttttttttcctgtttcttttgtcatcaaggcacaaagaataacagctttcaaaatagtctttggttttgtcctttaaatggtagaaggtcatcattttgttttcgcttttgtatttctatttctgatagataaatagacatagaaaaaatgatgtacagaagttggctaaattgtgataatatactctttaatttctgttaactttggataattctaataatgtttcttcttgttttgagtttttttgtttgtttgtttttgagacaaggtctccatagagtgaagatttactctgtcactccctggagtgtggtggtgcaaccacggctcactgcagcctcaacttcctgggctccagtgattctcccacgtcagcctcccaagtagctgggactataagcatgcaccaccgtgcccagctaattttttgcatgtctttatagagacggggttttgccatgttgcctcagctagtcttgaactcctgggatcaagtgatccaccgccggcctcgacctccgaaagtgctgggatttcaggcgtgcaccactgagcccagcctgggcaaattcttatgtgggggtcatttattaccatgtctgttattggatcactgctatttgacaatttagggcagaaatatcagaaaatagggaggccttggaggcttcctcttgttcgtgctgtgaactgttgggtgtgtgctcacaaattccaaatgaggacggaataaattagctcggttttgggatgccattcgaagctcctttataaaacttggaaagttgatttaagagatatttctctttcattgttttatttttaattacaaaagcagtagattttttttggataaagaaattagtttccctttcacattccaaaccaatgttcaaagatttgctggtttctgcctccttctttctgcttctagagctgcctcatgatccaatgtggttcttctaattatttgcttaaaaatgctcttaatgttttttgcctaaccaacttatttttaattttgcccaccctttgccattccctacccccaggcccgtacgtctttgcccgattgctattgaggtgcacatactttcagcagcctgtgccatttcacagggcaccacgagcaggctggcgtcggcctccttcattgatgccaccagtcactttttattacctgcctacgttccagaccaggttccctctatttcctgaagattaagaccctctgagtgtcactctgccctgctaaatcagttccgctcataatcctctgcttagaaatatctacagggtggactgggtcacgaccgacatcaccatctgacagctgttacaactccgtgcccaaactaaacttttcactaaacacttctttaggggacaccaaggacctcctcccagccctgccaaattaactcactgaatacccatttgccaaaagctggttctccaaatgatcacatttttaaaacttcccaatttgctggtttatcccaagttgtttttctcaaaacaacaacaacaacaacaacaaccccgcccacacacacacacattagaaacatttcatttcacttctttaacaaatgtttgtggggtttttactacacacaaggtgccaaagtgttggggttaaagtagtgagtaagagagcaaatgttctcatcctcatggaactcccaggccggtggaggaaacaggcaagaaggacataaataaatatgtaacacaggtggtcatggaaacatgtagagcaccctgaggcagcaagaagagtgggcatcaaataatataataacatatatgatgtagtatttatatagtataatactatgtgatgcaatacaatgtataatgtacacagtataaaaaataccatttgcagccgtaaaaaagaatgagttcatgtcctttgcagggacatggatgaagctggaagccatcattcccaggaaactaacacaggaagagaaaaccaaacaccgcgtgttctcactcaagtgggagttgaacaatgagaacacatggacacagggaggggaacatcacacaccagggcctgtcggggtgtgggggaaggggagggagagcattaggacaaatacctaatgcatgtggggcttaaaacctagaagacaggttgatagtgcagcaaaccaccatggcacaggtatacctatgtaacaaacctgcacgttccgcacatgtatcccagaacttaaagtaaaattaaaaaaaaaaaaagacagttgactcttgaacaatgtggggagttaggagtgctgagtcctgtacagttaaaaatctacagataggctgggctgcagtggctcatacctgtcactccagcactttgggaggccaaagtaggtggatcactggagcccaggagcttgagaccaacctgaacatagagagacactgtctctacaaaaaatacaaaaaaattagccaggcatggtagtgggtgcccgtagtcccagctattcaggaggctgaggtgggacaatcgcctgagcctgagaagtcgaggctgcagtgagctgagatccttgcaccactacactccagcctgggtgacaggcagagtgagacctgtatcaaaaaaaaataaaaataaaaaaaaaggaaattcatggagaactttggactctccccagacttagctactaatagcctaccaaagaccagcagccttaccaataacacagtcaattaacacatattttgtatgttaaatgtattatatactatactcctgaagtaaagtaagctagagaaaagaaaacgttattaagataatcataatgaagaaaaaatatgttcactcttcactaagtggaagcagatcatcttaaaagtcttcatcctcgttatcttccattaagtaggcagcggagaaggaggaagaggaggggttggtcttgctatggcaggggtgtcagaggcaaagaaaacctgtatataagcggactcgcacatttcaaacctgtgttgtttgagggtcaactgtatagtatataatgcaatataatatgtaatataggccaggtgtggtggctcacgcctgtaatcccattacattgggaggccgatgtcgggcagattacctgaggtcaggagttcgagaccagcctgaccaacatggagaaaaaccgtctctactaaaaatgcaaaaaattagccgggcatggtggtgcatgcctgtaatcccagctactcgagaggctgaggcaggagaatcgcttgaactcgggaggtggaggttgcagtgagctgagatcacaccattgcactccagcctgggcaacaagggcgaatctctccgtctcaaaaaaaaaaaaaaatatatatatatatatataaaatataatatataatagatatgatataatgtaatatgtaatgtagtactacataatactataatatgtaataatatagcatataataatattgcttagggagtagacttttagtgttcttatcgcaaaaacaaaagtatgtgagataatgcatatgttaactagctcaatttagccacttcacaatgtacagattttacaaaacacatacacaataagtacatctaatttttgtttgtcaatttaaaaataaaatgttaaagaaaaatatgccataaaacagaacagaatgtaatatcatctaatatgtgacatgatgatatgatacggtcatgtgttatgcaatgcagtaatgtgtaatatggtttagaataatacagtgacctggccaggcatggtggctcacgcctgtaatcccagcactttgggaggccgaggcaggcagatcatgaggtcaagagatcgagaccatcctggccaacatggtgaaaccctgtctctactaaaaacacaaaaattagccaggcatggtggcgtgcacctgtagtgccagctacgcagtaggctgaggcagaagaattgattgaacctgggaggcggaggttgcagtgagccaagatcaggccactgcactccagcctgggagacagagtgagacaccatctcaaaaataaataaataaatacaatagagtgacctaatgtaatttgttgggtggtggaaagagtagagcaggtggagggagtggggagtagtgcagaggcggctgatgtggtcagctgatgtagtcaggaaggctcctccaagcaggggacaactgccccaagacccgaaggatgtactcattctaccacagcaagattctgggggaactgcagagggaaccggaagggcacagtctccctgcagaggcacagaacatgctcagggaatggagggaagcttggtgtggtgggaatggagtgaacaaaggggagatgggagaaggtaagagtaggctgaagaagagcaatggatctcatgggacctcatgggacctcgcaggcacaagggagccgtctggatcttgttcccagcacgatgagacccttggatcttcttcaatgttgtgacgtctggtttctggatctggttgcccctgatcctcagtgtcccttggtttgcagccacagggctccaagctctgcctctaacatcacaaggcatgctcctccctgcatctctgcgtgtcctcttctcttcttattgggacacgagttattggatgtgggaccttccctcatctgctgtgacctcatctaaaataatgatatctgcaaaaattcgatttccaaatgaggccacattctgttctgagtggacatgaatttcgggggaccccgttccacctagtacagctaggaattggcatgggctggacggagtgagtgtgggtagaagtgagaaaatgctcactgacatggaaggaaaacccagagagtttgggatgtgcaaaccaaacgaggaaagattttagcagagaggacgaggtctaagttgtcatgtgtggtcaacaattggatctgatgaagactaaggactggattgtttctggcaaagtggagaatcctggggaacttgacaagagtaggtcagtgtgggttgggaatggaagccagatacccatgggctcgggagagagggaggggagagagttgaggggaaggagcagagagatgccttggatgtgttttgcctatgaaggggcagtggctagggaggaacttaagatctaaaaagcatttgtttttttaagatggaagacaacacagtatgtgggaatgttgatgggaagatctcatgcagagaaggaaatagatcggttgatgccagcaagagaagatgacaaactgactttccgatgagccacaagtgatgggatgcgctgttcagggggaggagttggaaagaggatttgccaaatggacaatttgccaaattatggatccactgtaaatgaatttctactaaatatttgtaaacattacacaaaatcatgccaccatgggatggtgttaatggacttcaagggtaactcttctctttcttttcttttcctttcctttcttcctccctctctccctcccttccttccttcctttcccttccttccttcctttctttcccttccttccttcctttcccttccttccttccttccttccttcctttcctttcccttccttccttccttttcctccattccttccttcctttccctcccttcccctctttctgtctttctctctttcttttttccaagacagagtcttgctctgttcctcaggctggagtgcagtggtacgatcatggctcctgcagcctccacctcctgggctcaagcaatccttccacctcagcctccccagtagctgggatcacagttgcacaccaccacgcccagcaattttttgtagagatggggtttctccatgttgcccagactgatcttgaactcctgggctcaagcaatcctcctgcctcagcttcccaaagtgctgggattacaggtgtgagtcactgcacccagccagctttgatgttttagtttcatttcagctgaaattaaatttggtttcactgtagattttgtttcactttggcagatttatctcagctctgtagctgatttgcaaatcaggctcaaagacgcatcagatttaggtgtaattctcattataggcactgagcatttctcagatgtcttacccatgttgaaaacatttgtgtgatcacactgggtaacatatctgttaagagaatttcaaaagacaggagtgaaaatgagttggataatagaaacctgttctaccttttgtattacgcttggtggaagcatcccgaaattctcattttaaatataaaaatcctcagaacacactgaacttcagtttggctacaatgaagcagctacagccaatgtaaagctaaactaaaatctgccaaaaaaatgaaacgaaaacttcaagtcagatcatttaaacagcacagaagtttccaggaactcccttacaattgggatcgctgtagctgtcacaaggagttaaaggaaacatgcttctgtcgctgttaactagctgcatccggtgaattgggcaaatttggccattcagggaattaaccatccacaaaagtaaataaataaataaataaaataagccagtcatttgaagaactgattttcagggaatttatttagcgttggtaatgtctaaaagttacatgtgtggttgttggttttatgattatctttaatgcattccgatgtatatttatatatacgatcttctccatgcctgacatatttcacggtaagataaagaaattcccgtggcttataaggaatggagactgaatttgaattcaagttgtttagaaagaaatggatgagcactgaacccacatatttgaattttttaaaagtccagctgacagatgttgaatcagcttatccccctgctggagaattttgccccaaggtaaaagcaagctttgatttcagcaccgtatgcatcgcagtgaagttgggcaaatgaatggtgtcttccatacacagcactacgtgtttggcatacggaatccctcccttgcccagcagtaaacagacttgaatacaccatctgtttgcacaccaactgtttgcaaggaaattttttttccttttctttttttctctgtgaagttaatgttgtgacaactttatattttctttttttaaaaaaacagaaatctgtgtttgtgtttacttagacctgggctaccttagatggttctcaggctcacttatacactttcatgtgttccattaaaaaatgtgatcgctttctttttcttctgattttggttgcaaaggctaagaactttcagaacagaattttgtttttgtctttaatacggagacgtttcgtgttgttctctggtttttcagatgggtggacacagaaaagacaactaataccctgaaattggttgaaacttgattattcattcttaaagtctgataattataactgtccagtaacttgataattccagttctgttttcctgtttagaacctctactttcttatttgagaaaaaatgtttgaggatgttatctcagtatgtgtttacttatcttagtacacattcccttgaacttttcgcttatcatgaccattgaaatatcttggaacatcagtgttagaaaagcaggaagaacgtgggaaactccccctgtgtgcacggtgggcccctctatgaattgcaccagacaaattccaaacaaagtgatggagaaaatcccccaagaaaattagcagtcttttttattcaaacttttttattcaaactttttgttgtactgtgtcaacagctctctggagaccaccgtgtgcccctcctgttccacagccaccccaaagcaactgttaaagatgttttgtgggctgggcacagtggctcacacctgtaatctcaacactttgggaggcggaggcgagcagatcacctgaggtcaggagattgagactagcctggccgacatggtgaaaccctgtctctattaaaaatacaataattagctggttgtggtggcaggcacctgtaatcccagctactcaggaggctgagacaggagaatcgcttgaatccaggatgcggaggttgcaatgagctgagattgcactccagcctaggcaacaagagtgaaactctgtctcaaaaaaagaagaagaagaaaaggaggaggaggaggaggagaaagaagaagaagaggaagagggagagggagagggagaaggagatggagaaggagaagaagaagaaggaagacgaagaagaagaaggagaagaagagcagctaccttgacagggacgtccaccttggaaggtgacatgctctgggtgaaaaggaaagttggttttattccagaagtggcacccctggggaggcggtgaacagtggaggcgtgttccaagaccacctctccacgtgtgcctccggatcagggaaattaggggagcttaaatgatggtcaaagtgcttttgggaaacgtgcacgggctcaggcggacagttaatcgcggcttccttggtcaatgtccctggccttctgcaggaatgctcaagctgttcttatcagggcggtcagcacattcccagggtggctggtcagctgctctctcttttatctctgttgaaggccttgttctccggaggctgtttttaataaagaagctacaaactcgagcaaagcaaggattctatgcaagcaagcaagcaagcttttctctaacacggagtcagtactgtgacacaacttcactgtcttcatcctgtccaactcctcaccttggaaagcctcccctgcacccccattgtttaaaacaaccacaaaaccctctgcacagctttcttccccgagtcctcctggtgattctgcacctcctgggtcttctcattcactgaactgagtgggttccttctcaaaacctgacctttaaatacagacgtttctgaaggactctgtccggggctccttcccttccctctccacatcctctccttggtggatttcatgggccgcttggctttatatgccgtccatatgccccagactccctgctgtagactgactgtgtgcacccattccccattcttatgttgaactcttaccttcactgttttccacaatggctgaactaatctacactcccaccaacagtctgtaagcatgcccttttctctgccaccttgccagcatctattatttttttactttttagcagtagctattctgactggtgtgagacagtatctcattgtggttttgatttgcatttttcttaatgatcactgatactgagcttttatatatatatatacttcttgacccatcaatcccattactgggtgtacacccagaggaatataaatcattctatcgtaaagacacatgcacatgtatgttcattgcagcactattcatggtggcaaagacatggaatcaacctaaatgcccatcaacagtagacaggataaagaaaacgtggtacatatatgccatggaatactatgcagtcataaaaagagacaaaatcatgtcctttgcaggaatatggatggagctggaggccattaaccttagcaaagtaacacaggaacagaaaccaaataccacatgttctcaattataagtgggagctaagtgatgagaacacatggacacatagagggggaacaacacacactggggcctatggtggaggatgggaggagaaagaagatcaggaaaaaatagataatgggtactaggcttaatacttgggtgatgaaataatctgcacaacaaactcctgggacatgcatttacctatatcacaaactgtacatgtaccccaaacttaaaagttaatgaaaaagagaaagaaatgttgccctctaaggtgatggtgttaggaggcgccttccaggaccgtctactctaagaggatctcctgggttatttgctgtgtctgcttctgtggtctggccttcacaacacttagtacagttcctacttattttatttactggcctatttcctgttttttgtttctctctatgacataatatgaaatggccgggcccagtggctcacgcctgtaatcccagcactttgggaggccgagatgcgcagattgcctgaggtcaggagttcaagaccagcctaggcaacatggtgaaaccccgtctctactaaaatacaaaaagaaaatcagccaggcgtggtggcaggcgcctgtaatcccagctatacaggaggctgaggcatgagaattgcttgaaccctggaggcggaggttgcagtgagccaagactatgccactgcactccagcctgggcaacaaagtgaaactctgtctcaaaaaaacaaaaaaaaaaagaaagaaatacatatttggtttctgctcatgttctgggcacacaggttcgaattgaaaagtgtatttgtttgctagtggtgactgctactaggggctcccggacagcctcaggttgggggtggttgccggggaaatcaaccatgtgattagagggttggagctttcaggtccctcctcgccacgttgaggagaaaaggagaggggctgaaggttgttgatcaccaatggccagggatgtaatcaatcatgcctacataatgaagcctccataaaaccccaaaaaggacagggtttggagagcttccaggctgctgaacacgcagaagcgctggtggggtggttcgcccagagaggacatggaaacgtctcaccccgtaccttcgtaactacagcctcatcctcctgatgcgatttcactgttatgcttataggacttaacacgttaatcacagccctttactctctgtacacactaatcaccacacagcaaggaatatttacataccacatcaacaatattaaatcctcattcatgcaagaaaataccccaataccgatacacctaacaccccttctcctattatccttaaaccccaaaatgattttgagttttacatgctgttgttatagtttaaccaaaacattagatcgtggatctaataacagaagtctacaatttcttatctaccgagaaagtatgcaagaactggtaactcatgccccaatatataacaatatggcattctcaacttttaaaggattagagttaaccattggtctaaggaaccaaaaacactggtgcaactccaaataaaagtaacaagtacattttcctcccatactgtaacacccctaatatcactaattttaccaactgctgctaccttaactgacatctactgtagtgatttgtaccccaattacgtaaaatcatccattgcatgcacctttgccattagcctcatcccaacaacaatattcatatacacgagccaggaatctgtcatctctttataataaatggatcatctaagtaacgtggtttcctgagttctgtgagccgctgtagcaaatgatcacacccaagcagggcatcgtgggaaccctgacttataggccataggtcaaaagtacaggtcccaactggggacttgcaattggcatctgaaatgagggcagacttgggctgagctctggcctgggcctgtgggatctgactctaactccaggtagtgtcagaactgaatttaggccaggcgtggtagctcatgcttgtaattctggcattttgggaggctaccttaggcaggaggattgcttgagctcaggaatttgaaaccagcctgggcaagaaggtaagaccccatctctataaacaaaactaaaaaaattagccgagtgtggtagcacatgcctatagttccatctacttgggaggctgaggcaggaggatcccttgagcccaggagtttgaggctgcagtgagctgtgatcctgccactgcactccagcctgggggacagaatgagactctgtctcaaaaaaataaaaaaataagaactgaatttagttacgggacacccagttgatgtctgctggaaaatatagagtagaaaaaaaaaaccccacacatttggcgtcagaagtggtctgtggtgagagtacagtaggagaataaacagttgtacatgttcccttcctggaaaagttatttccctgcactgagggcctgcattaattaggataggctgatagcactgcggtacaaacaatacccaaacttcattgatttcttattcactctatgttcattttgagtcaacagagagctctcatcattacagtcactcagggtcccaggttgttggcacatctaccatctcagtgtctactttatggaaaatccagcctgccacactagacttgccaaccagagcttctaccatggtgtttccatgtggcttgggcttcctcacagcatggcagcctcaaggttgtcaaacttgttacatagtggctccagattccaagtatgagcgtcctagtaaataagacggggatgcatggacatttatgaagcaactcagaagtcacatagcattacttcctaccctgtgggtgaaggtagtcatgagcccacccagagcgggtacatagaccccacttctcaatgggaggaacgtcaaagtcacattgtagcagagaatatggaaagaaagatattgtcatggtcgtttttgtaaaaccgtctgccatgacccctgtctctcctggctctctccctcagcttcgctggccttttttttttcttcacttccttaaatgccctaagtgctttcttacttccaggactttgctcctgctgttcgttttgtgttgtggtgctttttttccaggagcacttcttcccaacacctaaagcactcagcttcctcatcctccttcagtccttacaccatcagagaagacttccctgaccgccatagttgggcctgtgtcccctgatactatctttctcagatactgatttgtttccattgtaacacttagtgtaatttgtaactttttttaattgattatttgcttttctgtattatttccaacacgcagaaaaaaatatatagggaataatatagtaaacacgacacccagatttatcaaatctttacattttgccatatttatttcagagcattttttttaaattaggcacaaatgtaggtgaaggtccttgtgctctctttgaaataccacccacgttcctccaacaccgacatttggaattgatcattctcatgtctgttcttcctacattgctgctgaaagtaagaaagggtgttgtaacatgttccaaacctgtgtgagtggcattgttctgcaaggaggttgtaatgttctacccttttatttttagcattttgttaagttgtgtggctccgttcacagcaggtgcaccaccatattccaatttaggaattcaccctgttttacacatccatctcctcctaagcacatttaggttggttcttggttttactactgcaaatgaagccacacacccccacagccttgcacagtccctggcatgcagtcagcactcaaataagatttgtcacatacatgaatatcgtgatgaacattctactctgtatctctttgcccagatgtggggaatttctctagaaaacatttctcagcacagaactgctgaggggttgaggatgtgcttctccacctgcctagatattgtcaaattacattctcaagtggaagtttctttatgtctttctcccatcaaaatgaaatttccagaattcagaaaactcgtctttctccccgccccccgccatatttctgggtctcacagtgttcttgatgtgtagagttgctcaataagatttctagtcctgtgttgtccaatacggtgtccaccagccatatggagctactaaacccttgaaatggggccagtgccatatgttgaaataatattttgcatatattgggttaaacaaaatatatcattaaaattattttcccccttttttacatttttaaatatgactactagaaaatttaacatacgtagcttgcattacatttctcttggacatctctagagtatgtataaatgaatggatgagtgtattattttgactcaactttgggattagaatatgtttttgaggtctttaaccatggaaaattttgtctcccccggggacattgggccatgtctggagaaatttgtgattgtcacagctgggaagaggagggctgtcagcatctagggagtagagaccagagatgctgcagaacattctacaatgcacagagtggccccccccagcaaagcgtgatcagaccctccgtgtccacagtgcgcaggctgaggcactctggtctatatcaaggcttatattcttattcttatcccattaaatatatcatgattttaaatgttcttcgaaaaccaaatttgtttgtaaaggaagacacttacttttgtttgacagtaaaatgctatcccatctttgccattaatgttcttgtgtaggcattgtatataatttttttcacattttcttaattcacatcgcaatggtactctacagacacgtgtgattttttatgtatttatgtagaccagaagtgggcttgtatgtgtttaattctgctgtgtatttagctctgaagccttcctagttctctagaaaagctgcgtcaacacatacctgctgttaactcagggaagtgtctgtatcttcaccctttcaaccaccctagatatttcatcaccagatttttcatctttctgagtcttgtggaaatagatttcatcacattttggttgttatatccaacttttgtttctgttgttgttattttgttgtttggttggttggttttttttttgggttttttttttgagatggagtctcactctgtcacccaggctggaatgcagtggcacaatctcggctcactgcaacctctgtctcctgggtttgagcgattctcctgcctcagtctcccgagtagctagaattacaggtgcgcaccaccactcccagctaatttttgtatttttagtagaggtggggtttcaccatgttggccaggctggtctcaaactcctgacctcagatgattcacctaccttggcctcccaaagtgctgggattacaggcatgagtcacagcatctggcctatatctagcttttggagctcaaacattatgatgcatttttttcaacatttctattttcttttcttttagtttcttttattttcgtgtgtgtgggcgggggggggggctgtgtatatacacactctttgtctgcatttctattctgaagttctttttattttcctttatgacctactgacactctgtgtagtgcctgactttctttgagtatatattttgtatttttactcggctgtccatcaagtcttattcatgatggggtttccctgtaacctaactttttagtatttatggagatggatttatcagtattttcttttatatccactggcttgtttgttcattttaatggaaagtttcccaccgtatgattatagaaatatccacctatattgtcttatggtgaggtgagcaaagaagttctctacatgctctgaatattccttctgtcctcaactcaaatgcatcctcagagtccttcagcaaccaatttcagctgctaaaagcaagatatggaccaaaaccgaacatgatagagggttctactggagctgattatttctgagaaagagcaaatgatctctgaaaactagctgttaggatgttcagcttggtccagttgccaaacaaaaccccagggcaactactcaccacggaattttcccccaattaataacctacgaatgcccggcttgagtccaagctccatatgcactgacacccaactcaggaaggcaacggttttcccagaaacagcacaacatagccagtagttgggagacaaccatttctaaaccatagaaaagacttcatactagctatctgtttatagattgtgttcctgggtcatgtccataactggattttctctggtgttctgggagcaaaaatcttctgtcttctttttgaggtgagtagagtcttccaaatgtccttcatggccccagcccaccgttttctttatgtaggaaggttttagatgttggcacatattgacacctacttgcagacaggtttgttgaattacattatataaacgttgaaataataactcaagcagtgagtacattttcactcttactcccctgcacctagctttataaatcgctaaatacatgcattcagagaatctgtgtgcttttctcaacagctatgttgtgtaatggtgaacatcattatgcaaacacagctgcaaggcaagttccctagctcccagcctcagatcagaccttcattcccaggtcccttctacgtggaagttctggagtccacctgctcacagatgctcacaaagcactggcgggacatctaaagagtaataggaacccacaccgatgttctaagcaaggatgggacgtggccagattttcctttgataaatctactcagactcacacgagaaaaattaactgaagaccaggaatgatgaaggaggagcccagtgtagaaatagatggtcgcaggacacaggagagagacgatggagacagggatgaggtgggacagtcagggagagggagagatgcatccacgaataaagttttattggaatacagccccattcactcattctatattgtatatggctgccttcacactacaagggcggcaatgagtagctgagtcaggtgccgtatggcccacaaagactaagacatttactacgtgcctctttacaggaaactttgtttacacccagcaaaattgttccacataatgattcagaaaagcctaatgattcagaaacttttgttgacccagcttcgaggaaaattccacagagctcacttcctgcatagctggcactctcttgggtcatcatcactggtaggcttctgtgagaacagcggaatttatcctaagggcaataggaatggctgaaagagtcagcaggggatggcttgactccttgacctgtatgttccttcaaggagaaagagtagttagagttgtttttgcagtaacttgaacaagagatcagaagggcaggctgatgaaaaaccgatttctaaggcagaatggacaagtcttcgaaaattgattggctacagggctgcggagggagaatctagcacgggtttcatggttttgtttttgtttttttacaagacagagtctacgctctgtcatccaggctggagtgcagtggcacaatcttggcccactgcaacctctgcctcctgggtccaagtgattctcctgtctcagccgcctgagtagctgggattacaggcgcacgccaccacatctggctaatttttgtatttttagtagagggggtttcaccatgttggccaggctggtctcgaactcctgacctcaggcgatcaacctgcctcaggcctcccaacgtgctgggattacaggtgtgagtcactgcacccggccaggtttcatgtttttgcaaaagcagatgagaaacagctctcaggcatggatagtactcctatctctgggaaaagagaccctgtggatgtggatggacaaagattttctagaaagaggatgagtgaagggtgctgacctccaatggaggaaaaacacaattccaaaaggaaagaaaggctgaccaggcctaagcagggcgtctctcctttcctttcccccaggattcctttaatgggaagggcagagtccccaggaagcaactcttggggaggaagaagaacgaagctcccaggcagctttctaaccactcacctgactccacctatccctgggaggagtccctgtctccatcccctaaatggagagcagaaaaacctacggctaggctgggcgcagtggctcacacccgtaatcccagcactttgggaggctgaggtgggtggatcacttgaggtcaggagttcaaaaccaccctggtcaacatggtgatgccccgcctctactaaaaatacacaaaaataaatggggcatggtgttgggtgcctgtagtcccaagggaggctgaggcgggagaattgcttgaacctgggagacggaggttgcagtgagccgagatcgcaccactgcactccaggctgggtgacagagcaagacttcattaaaaaaaaaaaaaaaaaaaaaggaagaaagaaaaaaaagaaaagaaataacaagtattggcaaggccatggagaaattggaacacttgtgcactgttggtaagaatgtgaaatggtacagctgtttcagaaaacagtatggcagttacacaaaacaattaaaaataaaatgaccatataatccaacaatgccattgctgggtatacacccaaaagaattataagccgagttttgaagagatatttgcacacctgcattcatgacagcaatattcacaatagccaaatggtaaaggcaacccaagtgtccattcatggattgatgggtaaacagagatgtggtatagccatacaatagaatattattcagccttcaaaaaggaaattctgacacatgctacagtgtgggtgaatcttgaggacattatgctatgtgaaacaaatcagtcacaaaaagacaaatattgtacgattccacttacaggaggcacctagagtagtcaaattcataaagacagaaagtggaatgctggttgccaggggacaggaggggggaaaatggggagttgtggtttaatggatacaacatttcagttttgctagaaaagagtcctgaagctgaatggtggtgatggtcgcacaacactgtgaatgtcctcaacactactgagctatatatttaaaagtaattttgatggtaaattttaggttatgagtactttaccacaattttttttctttttttgttggagtctcgctccatcgcctggccaggctggagtacagtggcacgatcttggctcgctgctatctccaccgcccaggttcaagcagttctcctgccttggcctcccaagtagctgggattactggcattcaccaccacacccagctaatttttgtatttttgtagagacagggttttgccatgttgacctggctggtctcgaactcctgacctcacaagatccacctgccttggcctcccaaagtgctaggattgcacgcatgagccaccacacccagcccacaatttttttaaaatgtaaaacaacaacaataacaactaaaaaaacctgcatccatgagatgaacctgaaaagaaaatatctgttgcaacacacaaagccagtcaacactcttagatatggtggaggcagctttttctctgctgaaattaagggaatgagtgtcctagagaattctcaaagatgtgtcaatgtttctaacaggagttgcagctttttgcctcaaagttaaggacagctgcaccgtcaaaccttgaccatgaatgtttagggtgggttacatttgcccagtatttgtttgactctgttgaataacatcgcagatagatggttttcaacaggcagaagagttttttgtttgtttgtttgttttatctcttgtaggtttttccataataacaaacccaagtaaatcacgacccaaccagtgactggcaaatttagtgcaaactcttcaatgctggttccacatttggcacctggcttggattgatttgccactgagttttgtaaatatttccctcagcttttaattcattctttataaacaatgttgtttaaataaaggatatttgtgtttctcattctgacgttttcttttcaacgtccacttgatgagtataatgtctcccatgaaatttttatttgtagagtaaatattcctttctgtctggtctagtgcatttttatttgaataatgtatcatctgagtaaacatagccttctgtgctctctaaagccttcatcacgttggagggcccttaatatatttattcagtttaaaacttgtctgatgtaagtaatgtcattctggttgaaaagcatttacaaacaaaacaatgatatgccaagctttaatgtttacaaagattagcctggatctcataatagattatttattgtcattgcatattcagtggttttttttctgtaaatattattgagattacactttggaaaagaaaacattactagttttttgagtgttgaatggaatattgcccaactcagcagatcacaatgaaacctcatggttcttatcaaaatcaacaaatctgttgaaatgaatttaatgctaatgtctttgtatgtgatttgctgacctacaaaatgtgttttagttgcttttatttatcttttctttctgcttttaatttcttatttggaggagtcttggttctttttttagtttgtttgttttttgttttttgagacagagtctcgctctgtcagccaggctggagtgcagtggcgtgatcttggttcaccgcaacctctgcttcccaggctcaagcaattctcctgcctcggcctcccgagtagctgggattacaggtgtctgccaccaagcccggctaatttttgtatttttagtagagacggggtttcaccatgttggcaggctggtcttgaactcctgacctcatgatccgcccgcctcggcctcccaaagtgctgggattacaggcgtgagccaccgcgcccagctgagtcttggttcttataattaaaaaaaagtcttctgcaactgttttcattttctacatcttaatttttttggtggtcataattatttttcttatcatcatgactttcttccacatcaatttcgattatttttatattttgaagcacctaccattcttttttcagactaaaatttggcttcctaggatacttcctttttggcacatttgaattctgatgtgattgatatttttgaaaaaaaaaaaaaaaagaaagaagaaaaaagacccagaaaacaaaaaatctgaaattagatcatacacaaatgctttttgaaattgccatgacattgtatttggtggtgctgaaaaattgtgtgatcagagtactcttttgctatcatgattgatgaattgatgggttgaatgaatgtgtacaggaatttagtcactggagcatctgcttcttgttccactcttcagcatcagagggaaattcttatgtgacattttgcctggaacccccagactccctcaggaccgggcaccttgtgacatcttcatcaacaggtgtcctcactctttgtagaactccaccaagttggtctcaagtgaaacagggatgcagctaaattcgaggttacagttttcctgggatgttatcatcacaaacaccatgctagtgagttcattcctaacagaggagaacttgcatcttgactaagcattagtgatcatcaaatcctctgcttatgatttttaaacttctgatcttcagaatatttttccatgagctagctctggctttgtgcatctcaaaccttgtttctctcccatggctgtcatacttctggtgccctgagatgcagaatttatttctacttgatacacacatttgggtattgatgtagggttagtacagcaggtaggttgagaatttctggagcctccctccctccctttgttccgacctttccttagtcatatcatcctagaaagatcttccctggcttcgtctaaaacatggcctctcatttcattctctccctgacaaccctgatgtagttttcatttcaggactcatcaccccaacatcctttcctgtttacagcccatctcccctgctagaacacaagctctgagaggtggaaggcctctattgtgggttttggcgaatccccaatctctagatggtgtctggcatgtgatagagattcaacaaacacttcaacaaataatgaataaagttaaatttttcagagtgcaatcatgcctctcccttcctctgccagggcggaggctgtgcctggtttgcgcggcttctgcagctccagctccttgtactgagtctggagaatgatggagctcagtccattttaatcccatgaacattaaatgcgtggatgtgtggatgctgggatggatggatgacgctcctagcacggcagcttgcaggggattggcgatttccagtaaggtgtgctaagactcgaggaagcccattttctcttcatttgcaaggaccctgtctgataatgcaatttttcacacatcaatgctgtgcatgaggtgttgatggggtggctgtctgctggttccttcccccagcccatcccatcctccaaacagactattttgttgttagctgctctgctctgttcatccctcaagagctctcaccctctgccattgcaggggctgtctccatggaaactgtagccagcgtttccatggagaaagagcccgcagagtctggaattttccaggctctaaaggtgactgcaaaaacatctcagcacatctccagaactgggctgcccaacatggcggccactggccacaggtggcgactgaccacttgaaatgtggccggtccccgaagagacatgctgtcgtggcaaagcacacagtggattttgaggacttggtacaaaaaaattttttttaattgaaatatcgctaataatttttgtattgattagttttacctatcttttttttttttaaacagccgttgctagaaaacttagatttacatacatggttcacatttgtggctgaaattttatttctgttgggtggcattcttctagagtatgagtaactgaatacatgaatgaatgattgatttttggtcaaactgggattattatccataaaccgtcactttcctgcttttcttcttagatgatttgttttttaaatagttcattaagtatcttggttgaaagatttttttttttttgagacggagtctcactctgtcacccaggctggagtgcagtggcgtgatctcggctcacggaaacctccacttcccaggttcaagcgatttttttgcatcagcctccgagtagctgggattgcaggcatgtgccaccacgcccggttaatttttgtattttcaggagagatggggtttcaccattttggccaggctggtcttgaactcctgacctcgtgtgatccactggcctcctaaggtgctggggttacaggcgtgagccacacgcccagctgaaaggtttatagatataatttttagtattgaattaggctaggagttaattacaattctttgaacagccattgaaacaccactaatttttttttaaggaaccatctcctcctgagtgtaagacactgcatcctactgcagatgacgtcttgtacgtagattctacccatcagcttccaacatcttgctgtccttcacaatgttgtcatggctcccatgtagataggcaaaccttcctgattttcatgctgaccagatgcccagaaacaggatcgcggaggcaaagggtgtgtctccacactcggtgctttgataccaatgactcaaatacttaccagaaagactgtgcctacctactttcccactggcttcatctgaaggggtctgtctttatcacagcgatgattttttattttagttttgacttccagattttaaaaacattatggtgacatacacataacacaatatttaccaccttagctacttaaaagtgtgcagttcagtggcctcgagcacattgacattgttgtgcaatggtggtgttatcaccgccacccatctccagaactcttgcaaaacggacagaaagacaaacatggcatgttctcacttatttgtgggatctaacagttgaactcaaggatgtagagagtagaaggttggttaccaaaaggctgggaagagtagtaggagctggtggggaggtggaatggttaatgagcacacacataagaaatgttagcaagaataagacttactaagacctattagataacacaacagggtgactatagtcaatagtaacttaattgtacattttaaaataaagactgtaattggattatttgtaactcaaaggataaatgctttaggggatggataaaaaaaaccttgcaaaactgaaactgtgtacccattaaacaacaactccccattttccccactccagcccctggcaaccaacactctactttttgactctatgaatttgactacttttggtagtggaatcatatagtatttccttttgtgtctggcttatttcacttagaataatgtcctcagggttcatctatgttgtagcctgtgtcagaatttcctttcttttattcatttattcatttttttgagacagggtctcactccgtcacccagtctgaagtgtgcagtggcgtgagcacagctcactgcagcctcaacctcctgggctcaagccatcctcctacctcagcctcttgagtagctgggactacaggcatgcactaccatgcctggctaaatgttgtattgttttttttgttttttttttgagatggagtcttgctctgtcacccagactggagtgcagtggcacaatctgggctcactgcaagctctgcctcctgggttcacgccattctcctgcctcagcctccccagcagctgggactacaggcgcctgccaccacgcccggctaatttttttgtgtttttagtaaagacgggatttcactgtgttagccaggatggtctcgatctcccgacctcatgatctgctcgccttggcctcccaaagtgccgggattacaggcatgagccactgcgcccggcaaatgttgtattttttatagcgactgcgtttcacggtgttgccaggctagaatttcttttctttttaagactggataatattgcattcatggagagaccacattttactcatccacccatccatcactggacactgggtttcccaccacctttgggctatggtgaatattgacttccaattttgctttatcagaagattggagcatcttttcatgtttcttgaaagtttttgctgggtgtggtggttcatgcctataatcccagcactttgggaggctgaggcaggtggatcacttgaggtcaggagttcaagaccagcctggccaacacggtgaaaccccgtctctactaaatatacaacaaccagccaggcatggtggtgcatgcctgtaatcccagctactcaggaggctaaggcaggagaattgcttgaacctgggaggcagaggttgcagtgagccaagatcatgcctctgcactccagcctgggcgacagagggagactcgaaaacaaaaaaacaaaacaaacagttttgctttttctctttcatgaactctcttttcagatccctttctggcttttccaatgtgatgttcagttttaccatcttgacctgttagcacaattgcttgacccgagcaattcctttgactttacaccgcaatgatttcacctggtagattgttaaaccacatttgtgacaggagtcttcatgttcccacatttttagtgtttggatggtcagattgaacgcccttttattttgtgactgttgatgtttggattgttttgaatgagtcatttcccatcacatgattataaacatatcctcccaaatcctattttactgaatatgatttcttcagaaaagaaccctcttcctgctgtgcacaccatgcccatccctgcacccagaaactccagtcctcatgaaggcctccagatcccattgctgcaggagggattggcaccagatctgaattgcacctaggggtccctcgggagaacatgtctaattggaaacgtgtggttcttggaaaggagccgaatggatattgcctcctggcctggtcatcagattatattttagttcaaagactcaccgtggttgatattagctcagtgctcggctggaaaccaaaccctacgtacatctcctctctagcagggagcggttggatttcttggaaacaacttaatattggcctctgtgctgaagacatgcgtttccgaaccctgaaaatatcaaataccaggcatctcctttccagacgacatccttccctcaccttcgttagcttttctcctagttttccggggtggaacctcggcctcgtccctctttgatggactgggtgcctgtgttgagtcctggcccaaagctggtgtttttgtgtgcacgctgcagatttttaaacagaatagccatctgattctggatatgcttggctaacccaaattacacaatgggttgaaatcatggataggtcaatgagaatttcagggtttttttgtgtgtgtatacacgttcccacactcacactttcgcacacacacatacatgtattaccaaatattcgaggaaactgttttcattttcctaaaggcattatttgagtcaaagcattgtgtaaatgaatcttacaggcagcctctccccaatctgaatgcatctcacccccagcccctcctgcctttgtagaaattctgcacagcaaactgcttgcgaatcatgatggggaaggaagttttacttacagagcaaagggaatccacggaagtgatttaagcacgggagagatgcagtcacactttcctttgaggcctgttaatctctaggggaggaaataatttgtatttatgtacatatatgtatatgtgtatacatacatgcacacacaaccaataattattggtcaaagagaaagaacacttctagggttctggacctcaaagatccaaatgtctccccatagtctaacagctccgtgaaaaacatggcttagagcttgctgcgtgtccaggctttttttttccatgcttatctccacataaagttttacataaaattgggataccttatctgcagttttccatcttcctttttatttaatgcatgaacatttcaacatcaggaagtgtactttaaaatatggctttattttgaaggagaaaaagagcttgcctatttgtctctttttcccccgcttttatattttatgttatttttattagagatgggggtcttgctatattgaccaggctggtcttgaactcctggcctcaagcgatcctcccatctcagcctcccaaaatgttgggattacaggcatgagccactgcacccagtctttattttgttttattttattttattgtggtaagaacatttagcatgagatccaccctcttaacaaatttccaagtgtacaatacagtactgttttgtttttgagatgaggtcttactctgttgcccaggctagagtgcagtggcatgaacatagctcactgcagcctcaagcaatcctcccacctcagcctctctagtcgtctagtagctgggactacaggcacacactataggcacatgccaacatgcccagctaactgttaaaatcattttttagagatgggttttgccttgttgccgaggctgggacaatacagtactgctgactccaggtacaatgtagaacagcaggcctcacaagtttattcattgcgcttgactgaaatggactctgtttatgattaggaaaatgccacctgctcactggattcaccattcttggtgaagacggtttatagacttgactgcaaatgtgcgtatttcgtaaacaagactgcccaagtctcagtgatagacattctttgtacatttgagcgagtttccattgaggataaattcctggttatagaattaaaaagtggggcaaagaaatgaaatcagacacaaattgaccgattgctcaccacctataaggaggtaggggctgggatcaacttgtgtttttaaaggagggtcatggctgcttattggagaaggaccttgagggctaagcatggaagcctggagaccagggtgggaatggtccagatggtggtagcttagactagggcagtggccaagggtgcaaaatgaccggtgggacaggacaaagccttaaatgggaacagacccagggatagtggggagagatcctacttcttgaatcccttagagggttccagggaaccaggtccagatgtcagccagcatccttcccgccagggtatccctgatgcatgagctaaacagagtccaaatatatccagttaagtaaggaagagatcagccatggtggctcacacttgtaattctaaaactgtgggaggtcgaggcaggaggattgtttgaagccaggagttcgagaccggcctgggccacataacaagaccctgtctctacaaaaaaataaaaatatataaaaactagccaagggtggtggggcaggcctagagtcccagctactcaggaggctgaggttagaggatcacttgagtccgggagtttgaagctgcagtaggctatgatggcaccactgcactccagccaggacaacagagtgaaactctgtctcttaaaaaaaaaaaaaaaaaaaaaggcgtggtggctcacacctgtaatcctagcaccttgggaggccgaggcgggtgggtcacctgaggtcaggagtttgagaccagcctggccaacatggtgaaacccctatctctactaaaaatacaaaaattatccaggcatggtgtcgggcgcctgtaatcccagctactcgggagactgaggcaggagaatagcttgaacccaggaggcggaggttgcagtgagccgagatcgtgccattgcactacagcctgggtgactcaacgagaccctgtctcaaaaaaaaaaaaaaaaaaaaaaagagaaaaagcagatacgtgcggattcaaaaaccatcccagcacagagcagctgcatcatatatgtctttttgtacaaatggataaggatacctcactccccgccataattctatcagtaatagattgttttcggaggacagacaatgtcatctgggaaaaaccgctcctttagttcttcttatgatttcaattctgttagtggctctcaagagaaataactaagaacggtgaacaagaaaggaaagaggattctttcagctggttgtaagggcactggggagattgagccgcgtgatcacgtagatggtgactgggcgtggggctgcaccgaccgtgcccagcctcccctttagacatttattctccatgcagtaacttctattctttcatttgcagtaatgtagcaatcactgtgtgaatacatcctcgtcttagtctgttcgggctgctatagcaaaaatactatcgattgggtggattagaaacaacagatttttatttctgacagttctggagggaaaatccaaggtgcagcagatttagtgcctagggaagggccacttcctgctgtcttcttgagggagccctctggggtcttgttaaaaattaattaatcaattagtttttaaattgacaagtaaaatcgtgtatgtttatggtgacgacatgatgttttgaaatatgtatacattgtggaatggttatgttgatctaatcgatatatgcctttctacctccccccttttttttatggtgagaacactaaaagtctactgttttagcaatttttacattgtcatgaactatagtcaccacattgtacaatagaccttgtgagctctagggcctcttgtctaggacaataatcccatgatgagcctctaccctcatcatctaatccactcccaaaggtcccacctcctaatactatctcactgggagttaggatttaacatcaattgtggggggaggtggggacgcaaacattcaatctacagcaattatccttcatttgctccgtctcctcttgaggggcattctggctgctccccaccctgattttttattttggggatcagagtcactctgaatgtctcagacagtgcctcacacatcgcctcacacatcactctcaccttatcaatatttactgattggttgaaggttgcagtggacaaccttgtgtatgttcccttgcccacatgatggagaatttcttcaggtgatgtagataggggtggagccatggagaaagcacagtttttttttttttgtttgtttgtttttttgagacggagtctctctctgtcacccaggctggagtgcagtggctcaatctcagctcactgcaacctccgcctaccaggttcaagcaattctgctgcctcagcctcccaagtagctgagattacaggcacgcgccaccatgcctagctaattttttgtatttttagtagagatgggtttcaccatgttggccaggctgctctcgaactcttgacctcaagtgatctactggcctcggcctcccaaagtgcagggattataggcatgagccagcatatttgtttgcaaatagtgcagaatgtctttctaaagaggcattttccttgttttctcttggcagctctgtaagcaaggacctgctttacttttgctctctgccatctccccagcacctcacaccaagtctggtgcatacaaagtcctctatttgtctgtctcaaatatacatgagtgaatgaatgaattattttatgctccaaattggcattgaagtggatagatatatatctagcctgtctttctcatagcatatgttaccatgacatcaaatattcctccagaaatacttgttttgggaagaatttggtttgtgcatcaagactgcaggataaaaggatactcattgtatacacttgttgccaacttcttgctaatgtagacaaaggtgtgctaactcctctgtaccttcctgaatgtttgtgaatgtctgcagacagcagattcccagaagtagactggctaagtcaaagcacacatactttttaaattttggcacctctccccaaaatttggtcactagcatttgagaatgtccattttcctacaaccttccttactctaatattattcttgttttcgatacaaatagaagtcatttcgacaaaacaagtcattttgtcgaaatgacttctatttactttgagtgtctgttttggtattagaagtagggtagactcacgcctataatctcagcactttgggaggccaaggcaggcagatcacttgagcccagcagtttgagattagcctgggcaacatggtgaagtcccgtctctataaaaatatgttcttttttttttttgtattttaccggggcgtggtggtgcatgcctgtagtccctgctccttgggaggctgaggtgggagaattgctagaccacaggaggtcaaggctgcagtgggctgtgatcatgccactgcacactccagcctgggcgacagagcaagactcagtctaaaaaaaaaaaaaaaaaaaagtagtagtagggtggactgtctcttttatgtttattgcacctaaacatactctctggtaaatattctactcatagtctttgcccgtgtttctatcttggtgttcaacttttcctgagtttatattacatttatttatgtatataatttctatgtatctcatatgtttatgttagtgatacaaagttctggatcatcacctctatttttacatatttgacctgggcttgccatttaagtcttgtttgtggtggacgttttccttacacacaacacacacattttcaatttttgtgaagtatagatttattattttatattcgttaacttttgtgtcatatttagtacatctttcttcatcccatagcttcaaaaatattctcttcggttttcttgccatgactgcagaatggaggccacgagcccacttccttgccccaagccctgttccctactcacacggcgcgagcgctgccccccctactcagacggcgcgagcgctgccccccctactcagacggcgcgagcgctgcccccctactcagatggcactctagaactggaatgtcccacagagcagccgcaaaccacagatggctgttaagcacttaatatgtggctgctgtgaattgagccttgccacacgatgagtttcaaagacttagtattaaaaaagaatgtaaaaaatattattacaatttttatattgattacatgttgaaatgataacgtttttgaaacatggggtcaaacaaaatatatcattaaaatgaatcccatctatttcttttaaaagctgatagaaaataaaaatagtaaataataacaatgacttacaaaaatagaaatatctgcccaggcgctgtggctcatgcctgtaatcccagcactttgggaggccaagatgggtggatcctgagttcaggagatcaggatcatcctggccaacatggtacaaccccatctctactaaaaatacaaaaattagccggtgtggcagcgcacgcttgtaatcccagctactcgggaggctgaggcaggagaatcgcttgaacccaggaggcagaggttgcagtgagtcaagatcacgcaactgcactccagcctaggtgacagagcgagactccgtctcaaaataaataaataaaaaaaataaaaaatatataatatatgtattttatatatattatgtatataatagaacacttaaaatgataaaaatggctcatattataatctatcagactcaggtcctgcaagaagaccttggttactgcaggaagaatttgggctcaaataaatagaagttcagatggtagaaatctttctaactggagactcttggtctttgagaagtagtttgaatgtcaacatctcacccagttgccagataaaacctcggttcaacaacccaccatggaatttttccctgattaatgagctaaattctgtactggaatccaagcaatatatatgttgccatccaactcaggaagagactggctttctcggaaagagcacaacccacccagtgttctggagacctctatttccaaaccataaaaatattaaatactagccatctgttttgcagatcgcgtccctgatttccatcattcatcagtttcttttttcctccctctcgtttcctggggtgaacatcctgccccctcattttctgggttcccctcatgaggatctgttaagggacctggcatgaagctgctggttgtatgtgatgcataatgccagcctacttccactgaacaaaattctgttatacattcagagcaaaactaaacaaatgagaattcactaaaatttaataacagctttgttgagatagtcacatactatacaattcatcgtttaaagtacttataagtcaatggtttttagtatactcatagagttgtgaaatcatcagcacaatcaattttagaacatttagaattttagaacatttagatcatcccctaccaaaaaatcccatgccccttagtcgtaactcagcatttcctcccagtgttccccagccccaggcagcacatgaatctacttcatgtatctgtagatttttgcattttgaatcatatgatatatgacttttgggtaagattttttcacttagcttaatgtttttgagctcatctgtgctgtaacatgtatcagtacttaattcttgtttatggcagaataatatttcattgtatgggtgtgccacattttacatatgtattcataagttgatagacctttgggctgttttcacttttggctattatgactaatgctgctatgaacatttgtatagaagtttttgtttgtgtagatgtatgtttccatttctttggggtatatatctaagagcaggattactgtgtctcagggtaatgctatatttaaccttctgaggaactgctttccaaaacagctgcaccagtttacatccccaccagcatttatgaggatttcaatttctctgtcctcaccaacacttgttatagtctgtggtttttgactatagccatcataatgggtgtaaagtgacatctcactgtggttttgactcacatttccttggtgcctaatgatagtgagtatcttttcatgtgcttcttgggtatttgtgtatctcatttgccataatatccactgagaacctttgctgcttggtcacgctacacccaaccattttcgaaacatctgggctatccatgatagtttggatactgagtttatgtgggtacagtggaatcagaaaaaagaaaagttaccagagaatttagttggtaacgacaaatcctttggagagaaccttgacaggacttgctaatggacaacgtttgctgtacctgatcaggtcaactttgaagttaacagaggctgaagtgccggaatcaatccattccagaatgatttctaattaagggtgcaatataagatcactctggctacagggaaggaggcagaagaagggaaagggaaagacagggagatgccaggagacctagctggccactcactaaatctagatagaattagttaattcttccaatatgcttttattaatttatttataaatgagatacacagaaaaatgttaggtgcaaaataaaacacggaaaatttttcagaggataagatttaaaaaagtgaaaatggaagctccaataatttatttgcacacatgacccgttctgagacctcaaaggggtcgcagcatgcgatgaagttgggccagggtaacgacagaagatgggaaggttggggagttacgtggggtgagtggaatggctgaaggtagactctggagaaggatttgatttgatgtgctgatggacttggtttctcattgttggaaacgatgtgagaccaattgatggctgtagttgagaaggaaatgatttggaatgctcaggagggaggtctgggctgttggtggagggggacaaaatcatagagaagtgagttcgtgagtgtggccaggggactggaggagatgtcagtggggattaaaaaaaaaagccaagagctaacacggagtcccgaaagctcaacctggagacctggatgtgacaggagagcccccaggcctgggtctgcagctttctcagagcctgagatctacccagcaccctttcagcaatacttcttgtagatgccagccaccgctagtttctcttgatgcaactaagaattccaatgcaaacaaaatgcagcggctcacacgccctgctgtgctcccctctctgaggacctcatccaagaacatattttaagatatacaggacccattatctaagcacggatggagaaaactgcaggcttgagcccctcccccttgctgcctcaggagcactgattttctgtgaaggacagatgcagcctccagctgttgccatggaaaccagggctgcagagagtgaagttttccaggctctggagtccgttgtgtgtgggtggatgcaagatcccagcctggcatacagcaggcaactaataaatgtctgtagaaggactgaatgtttgtctcctcgactcccaccacacctcggcattctgtgctagaacaatcatcttcttgtgggcctgaaatctgtgaggttgaaattttgtaaaaactccctggatttattgagttataatttacatataatatgatttacctattttaaatatacagtttgatgcattttagtggttgtatacactcatgaaaccaccaccacaatcaataagcagagcatttaattagtctaaaaagtttcttggcccggcaaggtggctcacacctgtaatcccaatgctttgggagtctgaggtgggaggattgtttgaggctaggagttcaagaccagccttggcaacaaagcaagaacctgtctttacaaaaaaaaaaaaaaaaaaaaatcagctggatggggtgacacctgcctgtaatctcagccacttgggaggctgagatggaaggatcacttgagcctaggaggccaaggcttcagtgagctatgatcatgccactgcactccagcctaggctacagagtgagaacctgtctcgaaaaaaaagtatgtatatatatatatatatatatatatatatatatatatatatatatatatatatatatatatatatatatatatatatataaatttaaaaaaaagttttttattagtctgttctcacattgctgagactgggtaatttataaagaaaagaggtttaattgactcacggttccgctggctgtacagggagcctggctagggagaccccaggaaacttacaatcacggcagaaggtaaaggggaccaggcatgtcttacgtggcgggggcaggaggaagagatggggggatgtgctacacacttttaaacaaccagatctcgtgagaactcactcactgttatgagaacagcaaggggcacattccacccccatgatccaatcacctcccaccaggccccgcctccaacactgagaattacaatttgacatgagatgtagggagcggagtggatacagacccacaccatagcagacttttctgtgctaatttgccttggatcccttccctccctccaacccactaccacaccaccccgatctacttccagtctctactgttttgtgactttctagaattttatgtaaatagaattatgcaatcttttgttcaacttttttctcctaatgttttgagatactccatgttgttacatgtattaagattttactgattaatattaattattaaataattatattttattcctttttactgctcagtgatattccataatatggatatatcagtttatttattttcctgttggtggctatttaaactgtttccaatttgagggtcagggggtgcagttacagaattatacagctatcaacattcctttctagcaacattttaagatttgtcccaggtatttgcaaacctaaagtgttgtgcttttctcacaaaaacaatagacatcggtgtggatatggtgaaaagggatcactatacactgctgatgagcatgtcaattagtacagcctctgtggaaaacactatggaggtttgtcaactaactaaaagcagatctaccattccttccagcaagcccacgacggggtatgtacctgaaggtgtctttcatataaaagagacacctgcattcatatgtttattacagcataattcacaattgcagagatatgacatcagtctaagtgcccatctacagatgagtggataaagaaagtgttgtacatatacagcatggaatactactcagccattgaaaaagaatgaaatcgtgtcctttgcagcaatttggatggaactgaaggcccttactctttttcttttttctttttttttttctgagacggggtctcgctctgtcacccaggctggagtgcagtggtgcgatctccgctcactgcaacctccgcctcctgggttcaagtgattctcttgccttagcctcctgagtagctgggactacagtcgtgcaccaccatgcctggctaattttttgtaattttagtatagatagggtttctccatgttgtccaggctggtctcaaactcttgacctcatgtgatccgctcgccttggcctcccagtgtgctgggattacaggcgtgagcccaccgctaaaggcccttattctaagggaagtaactcagcaatagaaaaccaaataccgcatgttctcacttataagtgagagctaagctatgggtacacagaggcagacagagtggtataatggacagtggagactcggaaaggggacaggaagggagaaagggagggataaaaaaactacatattgggtacaatgtacatgacttgggtgatgggtgcactaaaagcccggacaacaccactatccaattcatccacgtcatcaaaaatcactggtattcatagagctactcaaataaaaagatttaaaaaacaaaacatagactggcacacacacaaaataatgtcttgtactttttgtttcattcttgccaattggatagaaggaaaataaatggtctccctgttgacatggctgcccaatttttggattacaaatgagatgaacaatccttcatcgttctttgaagtgactttctctctctctctctctctctcgtgttttttgtttgtttgtttttgtttgttttttttgaagtcttgctctgttgccaggctggagtgcagtggtgtgatctcagctcactgcaacctccacctcccgggttcaagcaattctcctgcctcagcctcccgagtagctgggactacaggtgcacaccaccacacccggctaatttttgtatttttagtagagatggggtttcaccgtgttagctgggatggtctcaatctcttgacctcatgatctgcccacctcagcctcccaaagtgttgggattataggcatgagccaccacacctggcctctttgagttatttttaaatgtacaaataaattattattgactatagtcacccaattttgctatcaaatactaggtcttattcaccctttctaactatttttctgcacccatttacaaccccacttgccccccaacccccaacccatactgccttgtgctgaagaagaagatgagaccattggcccctccctggcccaaacaccattcccccattccccccacattgaagcgcccagacctacaaggaggctttcagctcccggtcctgcatgaggaatttggaccaaatccaaatagaaaatggggtcagaagggaatgacatttctaactgaatagccacggtccctgagaagaagcagttacaacgtcagctgccagataagacgtcgggtcaaggacccaccgtggaacgtccccttggttcctaagccaaatgcccagctggaatcccagcaatacacatgttgccttcagcaagggaatgattttctcataaacagcacagcctggccaaggttctggagacctctgtttctaagccatggaagtattttatcctgggccaggcgccatggctcatgcctgtagtcccagcacttttggggtccgaggtggttggatcgcttgaggcctgggcaacatagaaagacctcatctctacaaaaaaaaacaaaaattatccgggcatggtggcacacccctgtggtcccagctactctggaagctgaggccagaggatcacttgagcctagcaggtcaaggctgcagtgagctgagattgcgcccctcgctccaaactgggcaacagggagagacactatctctaaaaatatatataaaataataaaacaaacaaacaaatattttattctggttgtcattttgcggattatatcccctggtcccgtcagtaatcattttggggcagttttttttgttgtttttttgggggtaggtgtgaaaatctttccgcttcataatattccaggcatcactgatgttcagccataactccccccacccctgaatatgctcatggaactaaatttccataacttgttggattccgtgaattaccaaaatcagtaagaatggacttttaacacttcatcttagtctgaattaagttcacacacatagctgtctgcacagggttcgtctgccttttcccataacaattatgtcagcacgacctcacagcaaagaccacattgctccctgtcatgggctgaaatgtgtgcccctaaactcacgctggaaccctactttccagcacctcagagtgtgagcatatttgaagatggggtctttacagaggtgatcaagttggaacaagatcattagtatcatctgtgtctcctgattcactatggctggagcagccaggtgtggtggctcatgcctgtaatctcagcactttgggaggcggaggcaggcagatcacctgacatcaggaattcgagaccagcctggccaccatggtgaaaccttgtctctactttaaaaaatacaaaaagtagccaggcgtgatagtgagtgcctataatcccagctacttgggatgctgaggcaggagaatcacttgaacccggaaggtagaggttgcagtgagccgagattatgccattgcactccagcctgggtgacagagcaatactccatctaaaaaaaaaaaaatggccaaagccctgatcaagagaggagatgaggacagaggcacatacaaagtgatgaccatggaaggacactgggagaagatggctgtgtctatacgctgaggaaagaggcctaaagagaaaccaaccctgctggtaccttgatctctcagccttccagcctccagaacagtgagaaaatgaatttctgttgttgaagccgccccgtctgtggtgttccgttgtggcagtcctggcaggttaatgcacgtacccaaccagagtgccccaaacccttcctacgtagcaattctggagcttagacagtctgtggatcatagtaaggaactaggtctttatctgacagtgacatgaatctgttgacgtgttttagcccgggcagtggtcacggatgccttttcttttaagacagtccatgttggctccactatggatgaaagccagggctggtgcatggcagagacacacacagaggagatttgggggacacaggacagagaggataggtgcccagacgaggtggggtagggggaatgacggagacagagctggctcaggggatgtccaggaggcagaactgacgaggcctggacgctggtgggattcggtgggtggcttatttcatgtgtccacctggccaggctccaaaccccacagtttccgtcaaaccctcatccagctgtggctgcgagggcattttacagatgcagttaacatctacgatagctgactttcagtgaaggagatgatcctggaggatgtgggtgggcctcatctcatcagttgaaggccttacgagcaaaaactgagttttccctgaggaaaaataaattccacctcaaggttgcagcattagctcctgcctgagtttccagcctagcgtcagtcagccccacagatgccatgcctcccagacttcaaaatcgtgtgagcgattgccttacaatgagtctcttaaaacagtggtttgcaacctttttggcaccagggatcagtttggtggaagacaattcttctgcagaccagggtggggagatggctttgagatgattcaagcacattacatttgttgtgcactttatttctattattattacactgtaatatataatgaaaaaaattatgcaactcaccagaacatagaattggtggggagccctgagctcattttcctgcatgctcccagctgggagtgatgggagacagcgacagatctctaggcattagattctcataaggagcatgcaacctggatccctcacacacgcagttcacaacagggttcgtgctcctatgagaacctaatgcggctgctgatttgacaggaggtggtaatgtgagcaatggggagaggctgtaaagacagatgaagcttcactcactcactcgctcacccacccaccctcacgtcctgctgtgtggcccagttcctaaacaggccataagccagtatgggtccatggcctgggggttggagacccccatctttaaagacaaaaattatatatatgacatatgtgatatatatatgatatatatacacacatatgcgtgtatacacctattatcaatatccccccacacatatatacatataaatatgcatgtatttcaccccatacacatatatgcttatccccccccacaaatatacttataaatatgcatgtatccccccacacacaaatatacatagaaatatgcagtattccccccaaaacatatatgcatgtatcccccacagacaaatatacatataaatatgcagtatttcccccccaaaacatataaacatgtatccccacagacaaatatacatataaatatgcatgttatgtcctacttagtctgctagggctgccataacaaagttccacgtaccgagtggctgaaacaacagaaatgtgttttttcacaattctggaggctggaagcttgcgatcaggtgtcagcagggctggtttcctcggaggcctttctctttggcgatcagacggccgccctcccggtgtcctcacgtgggctttcctcggtgtgtgtctgcatccacacttcctcttctgttgaggaaaccagtcctattagattgaggtccatcctagtgacttcgttttagctcagatgcctctgtgaagaccctatccccaaatacaatcacagtttgcggtgctgtggggttaggacatcaacatatgaattcagggagtctacagttcagcccatagcactactgggtttgtttctctggtaggactctgacggctacaggaacaggcaccatttctgccttaaggaactaggtggacaacctcaatccctgagaaagggaaggatttttgaaagcataatgggttcaacttagctgggtggagacctcctaagaagaggtaagagtcttgttctttctctgtaaaaggaaaatggttttctaacgttttactgttccagagaaagacaaaacgcccaacctccatttacatctgtctcagcgcgcctcattaattccctagaaagaactgctggaagttgaattactgggtcaaagaggataagaggtcctcgtgatttggttatgttactgagttttgttccaagtcaggcagcttggccataactcctgtttatttatcactgcatttctgtttaatcattttcactgcacagatagcatatcaatttttacttggaaattgaaactatatatatttttacaatttatcatcctgtattttccctcatgaggctgtccccatgatgtaaaatgatccaaaattttgattgcattgtccggaggaaaggcatttgttattttctcttaatcattttagtactgacttttcatacgcccttcttgtgctttatagtcttgtttccaagcacttcattttacaaacatgccgtgatgttccccttctatctgcgccctgtgcctttgtgtactgggactcattttttggggggagacagggtctcactctattgcctaggctgatcctgactgctggcctcaaacaatctttctgcctcagcctcccaaaatttgggggttacaagcaagagccatggtgcccagcttgagttacattctttaaaaatcaattcattgcatttggccttaatgggaagaccaaagcgagatgtatcatgaacttgaaaactacagtattgacaacctgtttatcagaaaggttcagaaaaattcctctcccaccatcagtatctcaaaccatccccacctcaactttgcttcctggtggtattagcaaattcaaaggtggtgaacatgaaagacatgtgaaatgttacagtgctgtggagatacggtatcgctagtcatttatgaatccacctaccatcattcatccattccacccatccacccactatccatccatccattatccattcatccatccatctatccatccatcctctgtccattacccattatccattcatccttccatccatctatccatccatcatcccttatccatccatccatccatccatcctccatctatccacccatccactcatctacccatccatccactcatcctccaactatctactatctatccatccacccatcaacagaggagccacagagggaagtactggggctggtcaggaagcagagggagtgagggggaaatgtgagcaggagccttttcgttatttccaagggagggaacgggtgaagcagagtgggcaggcttaggattggctcctgtgagtgatttcagtggctctgggtcacaggcactgtcctggttgtctggttcccaaccctgggtgatgaaggcatgcacacagaggccctgagtgtgggagcccaatggacggggtgctgggtgtgggctctggatggggtggtttgcatgtgaaaggcaccatctcaggggggttgtttatcatctttaggaaaatgtaaagaatcaaagtacagaaatttacacaggcgtggttgatgcaccggggagtggaatgggtcagcccaggcgaggatggggcatgttggacagacgcagctgggtgtggaggcaggacactgtcagaaaaggctcctcatggctcctctctccttagcggccctcccttcagcttctcaatctttaatgtgcattctaccccactctgggtctgatttagcaggtctggctggtgcctagtattctgcatttctctctcttttttttttcaagacggagtctcgctctgttacccaacctggagtgcagtggcgccactgcaacctccacctcccaggttcaagtgatcctcccacctcaaccttccaagtagctgcaattacaggtgcccgccaccatgcctggctaatttttgtatttttagtagagacagggtttcaccatgttggccaggctggtctcaaactcctgatctcgagtgatctgcctgcctcggcctcccaaagtgctgggattacaggcatgagtccccgcacccggccattctgcacctctagaaagctcccgggtgttgagaatgacagactttgatggtttgcctgagacgctctccattttagcagggacccaaggagcccccggccccgggcaaaccaggatggttggtggcttcactggtgacgctgctggtactggtactgggccacattttgagcagaaatgttctgttggagtctgcccttcccaaggcaggagctcagagaaaaaggagaaaattttcactctgttccctgctctgctcgggctgacctttcctcctggtaaacatcgtgttttctcctttacgcaacatgccctcaacccacctgaggccacgtccagtgtctggacatgcttggatatttttccctctggacagttcctgaccttctagatacatttcaacatgacctctgtctcaggttggggctcgccaaccgtgcatgtgaaggcatgtgctgtctctcggccgcccaaggcatggtctttgcattctgtccgtagcctgaacaatcattaaccatgcaattgccctcttttctgctcatcatgggccccaaacccctccgtaaccactggaagccatcgctctctgctctccacaaggcaaaagggtgaaatattttaataatcatacagtgtgaaacatctcaccgaaaaaaacacagcaacaaccaacacatgtaaaagacaagactgatgaatctgactctatatgtacagaaaatatcagcagctggaaaaaatataccaccaaaaaaaaaaaaattgaacagagaaactggcaaaagcagatatcacagagttaaactttacaggttaatatataaagcgtataaagaggtcagaaagacacaagtggaagaccaaaagcgaagagtgggcagaggatgacaacaggctgctaataaaagggaacatttaaacgtttaggaaagatgaaaagatattccactttatttatagtctactaaacttggcatcgaaaatcaaaatgagatatcactttctaccactcagacagaacaaggtttataaaatagcacatggagtgggcaaggtgtggcatgtggaaacggggtcatccgctggctggcggtgaaggcgtggattggcacatttctgatgcgtattttagcaataaatctgcaaaagagccagtcaacagagtcccttccagcagaacaaatatagggaagctgccttcctactgggcacttcaggttagtaatcggagaaaagcaaacaagcacgaaagaaatagaagagcgatttggcattatctagaaaagctacaatcggtggctctccattgtgggatgatttcaccccctccactccgggaaatatttggaaatgtgtagagatgttttttactgtcacatctggggcgtgagtagggagtgaactactagcatccagtgggtagagaccagagaggctgctaaccatcctgcaatgcacagcacagccctcatcaacaataaagagttaccagcccaaaatgttaatcacatcaaagctgaggaggctgccgtattgcccagcaattctgttccaagatatatgtcccaggggagctccctccattcccacaaggaccaagcataatcgtgctcattgcagtactcactcactcagtgcagatctgttgaatgtgaactgtagcccagtcactttgccgtgatgggggctattcacagttttttgggtttttttttgagacagggtctcgctccgtcacccagggtggagtgcagcagtgcaagcctggctcactgcagcctccacctctgagatcaagtgatacccccacctcagcctcccaagtacctaggattacaggcgtgtgccaccatgcccagccaattttgtctatctttttagagatgagtgaggtcttgctgtgttgcccaggctggtctcaaactcctgggctcaagcattcctcctgttcttggcctcctgaagtgcagggattacaggtgtgagccactgcacctggtctattcatattctttgtagtgaaaaaaagtgggatgctgggagaggaacaactgaaatgtctattgaaaagagaatggataaataaattgtggtgtattcgtaaagtggactgcagtacagaagattaaagaatgagaggtacatgtgtccctgtggaaagagcgcaatggatgagagcaagttgcgctgatagaacatccaccctttagcctggcgtggtggggcttgcctgtgctcccagctactggggacactgaggtggaaggatcacttgagcccaggaggtggaggccacagtgagccatgattgtaccactgcactcctccctgggtgacagagtgacaccctatctcaaacaaacaaacaaattgacaagagaagaaggaagggagggagggagggaggaaggaaggaaggaaggaaggggagaaagaaagaaaagaaaagaggaaaggaaagaaaaggaaaggaaaaaggaagaaagacacccaccctgttaccaaccaccctcccagatctgtctgttgggttgcactgatcccttgcagggaatcgtcttcttactttgtgagtttacagctcagctccgtgtcattattcagagttactgtaacaatgcaattcacgagaagccctgaatgaatgccgttgtggctaccatcaaatgttgacacagcgttcaaccccatcgagaggagatgcattactcaagacatctgtagacagggatggaggactggaagaatgaatgaagtcattcattctttcaacaaacttgaagcacctgaggggttcttgcctggcactttgaaccccctcctttccacccccaaacacacaaacacacacacacacacacacacacacacacacacacactgatatcagagcccagaaaattccagtctccgcagctccttcttcagccctccccttcccgcctccagctgctgtgtccatggtgacagtctgagcaggcctgggttgccgccgaacaggtgattgctcttgaaggaaaacaacaccaagccactggggggatgggaggcagtggaaatggctcaaaccctggccccacagctgtggcctgtgcaggacccgcatgtccctgaaaatgcatccttgagagctttgcaaaagatcacgaaatcggccatgagggcctccctgaccctgtcagagataatacatctcttaagcatgagtgacattggcgttagctttttttctacttgttcatttattcatatattcaacaactatgaactgactgtcctgggagctggtgatacaagaataaaacaaacagacaaacaggaggcacactctgatctgatagagacatttgctccttcaaagaagatttttttcattcattctggatggacttacggaagagccgctgcatgctggggccatgctgggcacagaggatgcaccacaaagagagagagagagagagagagagaggaagagaggaagggaggaagatgggaaggggggaaggaaggaaggaaggaaagaaggaagaaaggaaggacggaaggaaggaaggaagggagtcaaacaaagtccctgctttctgttaaagaacaaagcattcgatgagacttgttaaagcatgggaaggaacaagatttaggaccatagtgatgggcatagacagactgcgacaaggggattttgcagtgggggagagaaacagggtgctcagctctgaatgcagcatgggcaagagagaatctgtagccaagaagcagggtgggggtcagtggatggaaaattactgagaggaacatctggggtttcctctggctgagaactgacctaacaggattcttgttgaagacaggctcagggtgagttgcccgggggaggctgaggatgagggacgtgaaagaacctgtcactccacagggattgtcgtctagttggggagagacatggtaaatcagtatatatttttgttttcttctgtatcctcactgcctagcagaatgcttgggatctagtaggatcttcacaatcatttttcagattgtgaacaaatgaacaaataaatgggttctgtggagttcacaattcaaattctggtgcctttattcatgtaccacgttcatagcatcctttctcctgagagtatccaaggttcctttcttgggtggatggggagttggctggatatggggcatcccggacaaagatgcaactgcctttgcaaaaactatatcagtgagaaaattctgacagtgaaagagatctgagctaacccacctcccatcttgcctttcccttagttattcctgggctattgggccaagctgactttggaagacatttgcgctacagtgtaaaagaataataggctttgcccaaaactcaactgcttttgtaaagctaatgggaggctggccagtgtggtggctcatgcctgtaatcccaacactttgggaggctgaggcaagagaattgcttgagcccaggagttggaggccagcttgggcaacatagtaagaccttgtctctacaaaaaatataaaaattagccagacatggtggtgcacccctgttgtcccagatactcaggaggctgaagtgggaggatcacttgaacccaggaagttgaggctgcagtgagctgagatcacgccactgcactccagtctgagcaatagagtgagacttgtcttaaataaataaataaataaataaataaaaataaaaagctaatgagaggtcagccggtctcactgtgttgcccaggctggtctctaactcctgggctcaaggaatcctcctgcctcggcttccaaactgccaaaattacaggcatgaaccactgctcgcagccccaggcagaaaattcttgaagcaatatctgaccattcatctctctttcttaaaaaactttaacgggcctggcgcggtggctcacggctgtaatcccagcactttgggaggccgaggcgggtggatcacctgaggtcaggagttcgagaccagcctggccaacatggtgaaaccccatctctactaaaaatacaaaaattagccgggcgtggtggcaggcgcctgtaatcccagctacacaggaggctgaggcaggagaatcacttgaacccgggaggcagaagttgcagtgagccaagatcgcactgctgcattccagcctgggcaacagagtgagactctgtctcaaaaaaaagaaaaaaaacctcaacatattccattgctctttagattaaaaacttaattcttaatcaagacctaccagaagttgcagctccagaattcccacatggaagggacttggagggaagttttgggtcagagtggaggccactgtggggtttgccgtgttcacaatgccattcatttgaatcaatgctgtctgccatgaaaagtgtacaagaaagtgaaggcatgaagaaatcaatgtccaactggcattgacttctttttatttcaaattagtataagaaataggccaagaagcacattaggaaacagaggatatgacggttaattttagatatccacttggccaggctgtggtgccatgcggtttgatcaggcaccagtctagatgccgtaggtgctgagtcgatgtaattagcatttacagtcagttgacttcaagtaaagactagtctccatcgccttgatgggccttatgcaatcagttggagatggactgttttttccaagaaaaaagaattctgcctcaagactttaacatagaaaccctgcctgaagttccagcttgctggcctgccctgcagatttcagacccagggagcaatatccactgttccctcagtccccagcctgctgccctacccatcgggcttgccaagcccggcaattgcaggagctaattctctaaaatagattcctcccctcccctcctttcccttcccctcccctcccctcccttcccctcccccctcctctttccccctcccctcccctctcctctcctctcctcccctctcctgtcctttcctcccctcccctcccctcttctcttctctccgcttctcccctgtcctgtcctcttctcctctcctctcctctcctttcctcccctcccctcccctctcctctccgcttctcccctgtcctgtcctcttctcctctcccctcctcttctcctctcctctcctcctcgctcctctctcgtgtctcctctccccacctctcctctcctctcccttcctctcccctcctgtcctctccccttccctcccctcccttcccctctcctctcctcccctctcctctcatctcctttcctctcctcctctgtcttcccctcctctcttcttctctcctcacctctcccctcccctctcttctcttctctctctcccatgcatgtctcctcttctctctatacttctccatcttcctctgtctctgtccctctccctccctaccttcctccgtatctctctgtgactctctctctctctctctcacacacacagacacacagacacacacacacacacacacacacacacacacacacacacactgttggttctgcttttctgaagaaccctagcacagaagggtattgtgcgcacaagctgacaacatagacacaccaacatctgctgcctgccaggccctcaggacaggagaccagaccagtctgtagatatcaagggagtgagacccaccccaaaatgtggagaaaactggttaacaacctgatacatggacgtggatgacagcagaatggctggtagtcaatattcttaaactctttgtatgattcggaaacaaacctctctaaagctctgtctgtattgtgctgtttctgagaaaattgttccctccttgtaccctgggctcttgttgaacataccacggtggatctttgagctgaaactttgtttgggtcctgggccagatatgaacattttagccacttctccttcaccaccaggagcatccccgtggcaatatctgtcccatccaaaccctctttggccctcatccctcccttggcgttggtgctgtggtccccggatggtttagactctatcagaggaggagaaggaggcacatccttaggacagggagacagctcgtggcctcgacttccctcccacaccaggacactcaggagaatagtttcataatttgggtgcagaaagtcttagtgagcacaattcttaaaagcttacaatcattaaagataagaagaattaaactgactccataagagctgaaaaaggcctggcacggtggctcacacctgcaatcccagcactttgggaggccgaggcaggtggatcacctgagatcaggagttcgagaccagcctgagcaatatggtgaaatcctgtctctatcaaaaatacaaaaattagctgggtgtggttgtgggcgactgtagtcccagctactcaggaggctgagacaggagaatcgcttgaacccgggaggcagaggctgcagtgagccgagatcatgccactacactccagcttgggcgacagagcaagactctgtcaaaaaaaaaaaaaaagctgaaaaagtaggcacagaataacaaaaatgtaaaccagaagaaatgataaaaatgggtgaaactattttcaacctaatgagattcaaagaaactatatagtttacatgtgaattgtgtttacaagaaaagaatttaaaatacggggtaacataaactttaaaatccatcaaaagagcaacaggtaggaacagaaaagccttaaaagataaaataaaatgtgccaaataaggaaaatgatgtttcgacctttcttgtactccaaaaaaatgaatatgcaaaccatactgggaagtcattctttctcttgtcagatggacaataaggaaatagacaagcagagttgactatggggtgagagcggacgccttctcaggctgctggggagagcgagttgctgtgacctttctggcaagatcttttggcagtagacttcaaagtttaatatctgcatgccctttgacccagcaaatccacttctgggaacccacctccccacagacatacacaaaagcacaccccacacacacacatggtcatggcagccttgccagagcacgatcagccgaaaagtccatagaacgtgcatctgggttgtgtgaagctcaacactgatgcagaattttacagtccaaagacatcagccccttgttagacaaatgagctgtgttttgaaggtcatctaatgttaagatgtatattacataagcaaaagttggattaaaaaacaaaaatgcatcattatccaagtttgagcaactgtaatacatttatgcatccatttatttattcagcttctaaaaaccattgatgctgggcatggtggctcatgcctgtaatcccagtactttgggagggtgaggtgggcaaatctcaaacctgggagtttcagaccagcctgggcaacatggcgaaaccccgtctctacagaaaaaaaaaaaaattagctgggtgtggtggcgcctgtggtcccaggtacttggggaggctgtggtgggaggatcacctgagccagggaaggttaaggctgcagttggaggttgaggatcacctgagcctgcgaggttgaggctgcagtgagccatggggatgccactgcactccagcctgggcgacagagtgagacccagtctcgattaaacacacacacacaaaaacaaacaaacagaaaaaccattgaacactcacgctagatattctatcagggagagaggatgtggcagagctaaaagaaaacagagtgtgcctgctttcacacaacgtccatttcactgggtgaaaatcacagaagaatataagtacaagaccattttggagagcaatctgccggtgtctaagaacgctgatcctatgtgttcccctatcgcccagaaattccagtttgagatttgtgccctagagaaactctcacacatagggcaaggaggcaagttcaaagatgttcattgtgactttcattgatttggcagatattgattgagcagaaactgtggactgggcactgctctgggctctggggagatgtagcgttgcttgtgatggccaggaaagcaggaggagaggttacatcccaagtgcctgccaatgcgagaatgggtgaataaactgagtggaacgtgaagagcggggagagattgggatcaagttgcagaaggatcagtccacagaacagtcctgcgcagaccctctctcagagacctggttaatgtgctttgtggacctctcaactctgaaattatttctgtcctctccttttttcccagtttttaaaattgtggtaaaatacacataagcaggccgggtgcagtgactcatacctgcaatcccagcattttgggaaggagaggcaggaggatcatttgggcccaggagtttaagaccagcctgggcaacacagtgagaccatatctctaaaaaaaaaaaatttttttttaaattagccaggcagggtggcgcgtgcctgtagtcccagctactcagaaggctgaggcgggaggatcgattaagcccaggagtttgaggctgcagtgagctgtgatcacaccacacactccagcttgggcaacacagcaagaccttgtctcaaaaaaaaaaaaaagccataatataaaatttgccattttaactatttttgagtgtacaactcagtggtattaaatacatttataatcttgtgcaaccatcaccaacatacatccccagagcttgtttcatttgtaaaactgaagctctgtccctgttaaacataactccaccgtcccccttccccagcccctggcaaccactgttccgctttctgtctctctgttatttgcctactccaggtaccttatagaagtgaaatcctacaagatttgcctttttttttttttttttttttttgtggcagagactctctctgtctcccaggccagaatgcaatggcgcaatcttggctcactgcaacctccacctcccaggttcaagcgattctcccacctcaaccacccgagtggctggaattacaggcatgcgccaccatgcctggctaatttttgtatttttagtagagatggggtttcccatgttggccaggctggtctcaaactcctgacctcaggtgatctgcccaccttggccgcctcccaacgtgccgctaatagaggcgtgagctaccgcacccggccggattttcccttgcgtgactggcttatttcacttagcctaatgtcctcaagcgtcatccacgttgcagcacgtgtcagaacttctttcctttctaaggctgaataatagcccatgttccgtttgcccatcgttcgttggtggacaccggggctgtttccacgttttagcaatcgtgaatattgctgctgcgggtgggggcagagctgtctctctgagactctggtttcaactctttggggtacgtggtgactccagttttaattttttccagctttcccttctctttgtgccttcagctggagtcattctggatccaactaagataactcatctgagcaggtggactgactgtgtggctcccacggacacagccacaaggagaaagttctcttggctcagatagaggtggggagggggtgcagggctgttcgttttctcagaaaacttgtaggaagcacctgcgttgcactaggcgggcattttgatctcagcacacttccagctccagacctggacatttgcagcctcctgggccttcactctggttcctcagcccctcccctcctctttggctatggtttccacggcaacagccttggcccgggcctgcctggggcctgcatatcagaggacagtgcttgagggaaaacatataacaaccgcccccgctcttccaaagaccgagaccggctggggaggcgtggacttgcggggcagggggctcacgctgcagctccgcctcccccatcgctgggtcagtctgaccccgttagctctttcctgtgaatcctgagaggcggtccctgagaagcgaaagcctcctgcaagagccggtgatgtcagtctcagcttttccacaccccttggttcattccacacatccattgagcaccactgagtacctgacgctggtcctgaagacaggggcgcaatgctgggtgttctcagcctgagactttcacatcccagacatttgtctgccagacacatgcattgaatcactcgaccaatacggactgagggctcagcagggcaagggtgggtgccacaggaaccagccctaggcagagatccctgcctccttggggtttccattctagtggggagtacacatggtgagcacagaacacataaagtcacagcacgatgagcgtggccaagaaacatcaatcgggggagagacggagtgacctgggcaggctgttttaggtaggcgtccgggagggcctcgagaccatgacgagaagtgagggaagggagcagagggacgagcattccaggagaggaaccagcaaggccaagagcttggaggtgggagtttgtggggacatgcctgtgtgagggaagccagtggcccctggcagcaagggctcacaggaggtgagggctgagtcagtaaggggcaaagggcatcctcctcctactcctccctgcttttcctcctttccctgcctttcctcctcctccccttcttcctccccctcctcttcctcctctttctcttcctccccttcccctcctcctcattttcctactccacatcctaatcttcctccccttccctctcttccccctgccccctctttctcctccttctcctccccttcatcctcctactcttccgccccctcctcctcattttccttctcctcctcctaatcttcctcccccttctgccccccttcctcctactgatcttcctcttcttcctcttcctctccttcctccttctcctccctcctcatcctcctctttgtcctctcctttttctaaaaagccttttaacttgcctggccaacacagtgaaaacctgtctttactgaaactacaaaaatgcaaaaattagccaggtgttggggggaatgcctgtgatcccagctactcgggaggctaaggcaggagaatcgcttgaacccaggaggcagaggttgcagtgagccaagatcactccactgcactccagcctgggtgacagagagagactctgcctcaaaacaataaataaataaatcttttaaaatgtgaaaagcattcttagcactctaactgccatggttttcacactcctgaactacagtatgattccgatagcacgtagtacattttatgtatgcatatatgtgtatttacaaggccaagaaaataaatagcaaaataaaaatatgattacttccagactgtctgaatatgaagtaaaaactggtattttaaattaaaagcgttaacaccttttattctcttggatccaataattctacatccaatctttttatctttttcatttctctctgaggatttcatatgatgtggtcaagttagtgtataaggctgttgttctacctttctgtggaacagtgaaatactgacaaccttattctctcttcccagaagaacaccatggcttaatcaaaaacttcttggctgggcacagtggctcatgcctgtaatcccagcactttgggaagccgaggtggggagatcacaagatcaggagttcaagaccagcctgaccaacatagtgaaatcccgtatctaccaaaaatacaaaaaattagctaggcatagtggtgggctcctgtaatcccagctacttgggaggctgaggcaggaggatcgcctggacccaggaggtggagcttgcagtgagcggagatcatgccattgtgcactccagcccaggcgacagtgcgagactctgtctcaaaaaaaaaaaaaaaattctttcataggaggaacttccagaaaaccaacacctagtgtatatttaaatattcctcccggctgggcacggaggctcacgcctgtaatgccaacactttgggaggccaaggagagtggatcacctgaggtcaggagttcgagaccagcctggccaacatggtgaaaccccgtctctactacattcaaaaaattaggtgcagtggcgggcgcctgtcatcccagctactcaggaggctgaggcaggagaatggcttgaacccgggaggcagaggttgcagtgagctgagatctcgagccaccgcactccagactgggcaacaagagtgaaactctgcctcaaaagaaaaaaattatatagatatattcctcttctcaaggaaagaagcccccaccacccagtcccagttccctgagacagaaactggggaatccctgactccctgtcacaccctggacatccagccgccggggctgccaggtacttctccgggtggctcctgagtcagctgagactcaggagtgtggttctccctctgcccaccccttgtgctcttcccccgggacccatttcccgccacctgcacccactatgcttgactttcatcagttgtccacacagaacacggactggaatttcttacaggaaaatctgaaccatggccctcccttgcctaaaacacctcaaagaatacactttgcattttatataaatactcgaattcttctcaagattcacaagctgttggagctctagaatttctacatgggagggagtaagagtagcaattgagccacaatagggatgcttggaggcttgccttgaagctgtgttcacaaaatgttgtcaccagttgtgggagggaggaaggaaggaaggaaggaaagaaggaaggaaaggagggggaaggagggaaaacggcttcttttacagtatgtttctgtgggtacacacacagaaagcaaggttatgaaatcataaaggttattcttacatgttatatctcacttattatacatatgttatatatctcatttattttaatcctcattcatttttactttaattcaacactatacagaattttggaaatgggtttgcaaggcccccataaagtcacttagtacaggaactaaaaccaatagaaattagagccaaggtttttaaccccaggaaaggagagagaaactcatttacaactggagccagggacataatctaggaaacagacacctagtattaaatatgtttatgaacatattgaaaatgaacaggcccagaatcctggccacattttactctttccgagaaagccattcccttcctgagtgagaaggcgagagagggagattcagagagattttgggcttcaccctggcattcgggacattaatcagggaaaattccaagtaggttgatttatctggcacttggctgaatgttgacattcttacagcctcgtccaaaaagccgtgagattccgggagaaacttccctctcatgggagccctcctttcagtttaagtctggcccagattcctctgtgagcaactggagccaggaccctgctgaacagagtttctctgtgggcacaaagtgcactcaccattgccttttctcagcttggtgtgagagggtgtaagtgttcttatcatcacagacaggcaagacattccgtttttaaaaggtaaaaagcattcttagccctctaactgccatggttttcacactcctgaactacagtataattccaatagcacgtacattttatgtatgcatatatgcatatttataaggccaagaaaataaatagcaaaataaaaatgtgatgacttccagactgaatatgaagtaaaaactggtattttaaattaaaagccttaacaaattttattctcttggatccaataattctacatccaatcaagtatgaaagaaaaggtacatgcttcttaccacatagagacaatgagataccacctcggacccatcggcagggctactgtcaaaacaaaccaaccaaccaacaaacaaacaaacccagaaaatagcaagtgttggagaggatgtggagaacctggaaccctgtgcctggcaggtgggactgcgcttctgatagggtattcataaagcagaaaaatgccagagcttgggcaacatccacaaagctctcacctcacttgtaatccaaaaactggatgccagaccaggtgtggtggctcatacctataatcccagcaatttgggaggctgaggcaggaggatttcttgagcagaggagttcgagaccagcctggacaacatagtgaagccccatctctacaaaaaatacaaaaattagccgggcatgatggtgctcatctgtggtcccagctacttaggaggctgaggtggaaggatcagcctaggagtttgaggctgcagtgagccaagattgtaccactgcactccagcctgggcaacagagtgagaccctatctcaaaaaaaaaaaagaaagaaaaaaagaaaagaggatacccaaaccgaattgaaccacagtttccactgtatcctatgggtgaagatgaaaatgcagttggcaggggctggggcaggcacgtgtgtgacatactgcgtctgttcagcattttggggaatgagttcagactttaaaatatgttcactctttgacccagcggttctgcccctgagtgcacaggacccctagtccccaccttgtggtcattacagtgatgtttatgaggcgactcattaaaagaagggatgtcgtggctggcagtcaacagaagaaagcaattttgtataaaacaacgtgtgtttcttcagcatcctgaacgccatgggtcggggtccccaggggcacctccaagtttcatgactcactggaaggactcacagcaaaagaatgaaaagcaaagtcagcgagggggaatggcaccgagagccctcttcgcgggagtcacacaggaggcaccgattcctccagcaaggagttgcaacaacacctgtgaaatgtcatctgctgcggaactcattagagactcgatgtccggggcacttacttggggctggtcacacaggcacctgctgcctggcatctaccagaattccagacgcccagtaggaaggcggctatttagcataaaccatgctatttgcataaacagtgtggacacagtgagacaccagcccaagggccaacctgctacataaaatctttcattgcccgtcgtaatagcaagataaaccaggataaagacttatgtatagacttaaatcccaacgctgagtaaaaatattccatttactcatttttttcttcacaatctagtgatgcttgatgatggtcacatgaaaaagagcaaacatagtggatgcccctgccttcctgaaacctccctgatttatttatttatttatttatttatttagagacggagtcacgctctgtcaccaggctggagtgcagtgctgcgatctcagctcactgcaacctccgtctccccggttcaagcgattctcctgcctcagcctcccgagtagctgggattccaggcgcatgcgccgccacgtccagctaatttttgtatttttagtagagacagggtttcaccatgttggccaggatggtcttgatctgttgacctcgtgatccacccgcctcagcctcccaaagtgctgggattacaggcatgagccagcacgcccggcctgaaacctcccttttaaaccacaatttgggaaagcaatttggtcccatctagaaaactgtttatggtttgaaaatgcacgtacccagaatcctggccacattttactctttctgagaaagccattcccttcgtgagtgagaaggcgagagagagatttagagagactttgggcttcactctagcatgtgggtcattaatcagggaaattccgagtaggttataaatctgtgcttttcctctcccccagcagctccattcctagaagtttcaccagagcaaagtctcccacgtttgggcgaaggagagaagtacatgtagcaagcaccagctctgtgctgtttcagggttgtttgtaacagcagaaaatcctggggccatcgacaggagaagagatgagtggatcctgctgtgttcccctagtcggatactctgtagccatttaagtggatgactgagtgccatgtgcacccgcacggatacgcgtcaaggcagtgatgatgtttgaggatgacacgtctcaataccgcgcagctagtctcaccacccagtcactctctgtctcagtcgactcaggctgggtctcagtctgtttgtgctaacaaaataccacaaactgggtaatttatgaagaacagggatttatttctcacagttctagaggctggaagtcccagatcgaggtgccagtggctcagtccctggtgggggctctcctcctggcttgcggacggcctccttctccctgtgtcctcacatggtgggagagacttagtgtctggagaactcactttcccttctcatagagacatgaaacctgtcatgggccctaccctggtggcctcatttaaatctaatcattggccaggcacggtggctcatgcctataatcccagcactttgggaggccgaggcgggtggatctcctgatgtcagcagttcaagagtggcctggttaacgtggggaaaccctgtctctactaaaaatacaaaaattagccaggcatgacgatgggcgcctgtaatcccagctactcaggaggataaggcaggagtatcacttgaacccaggaggcagaggttgcagtgagccgagatcgcgccattgcactccagcctgggtgacagagcaagactctataaaaaaaaaaagaagaagaagaagaaggaggaggaggaggaggaggaggaggaaggggaggaggaggaggaggaaaatctaatcgccttccaaaggccctgcttccaagcaccatcacactggggctttgggcttcaacgtatgattttggggggtaaacaaatgcaatccatagcactgtctatgttcctcattgtatgaagaactgaaattgtttcctgacagctttgcaattcctgacagttttgagctttatccaccaaaatctacctggcaaggagagctaggtgcatgccattctccctagaatcgaacactgatcagttctggttttgccttgcaaggaagaaacattccttacagcacagagagtgcaggtggggatgggaaacatgttttgttcttttcctgagctcatgttgtgttccttgtatgctgggacattttcaaacccacgcatgctcacctctggagcctggacattgcccagccctgagcctctctcagcagccccttcctggctcccacacaagctgcagtttccatggcaacaggcagagctggcctttgtccttggagcctcccggtgagaggtctttagggaaaacaggctggagcaatggacaacaaaattaaacagcatggggccccgaggcgtgttctttcctataattaaactgcacccttggacatttgtagaatgccataaattggctgtaccctgctcagcattccaagtcccctgcaagcatcataatcaaccattatctgctttcatcatttgtttcttcatttgtctatgcattaaccattgattttaccccaacagtagtagcagacacgcttctagaaaatggagatcttgcagaggtttctaaccagggaccattttgcttacaaagaggcattcggaaatactttcagtcggcacagctggaaggggtgggttctattagccttgagtgggtagaggccagaggtgctgctaaacatcccatagtgtacagaacagccaacccctgccgaccccgacacacaaggaggaatgttctggccccacaagtcaggagtgccctggccgagaaaccctgggatacagtgatttgcaagaacccacaatgaaaacccttgaggcacgtacgctctagggaaggagacagctcatgaaatataatgcatgtgccataatgaagaatcagagatagtaggagagagagcaacgggggcgaaggagatggagcagccagggctgtcttctcccaggctgtgataagtgaagagagacgagtaaggggaggaagcagtcctggggaaagaacactggggagtgggcacagcaggtgccaaggccctggggcagaaacacacggagtgcattctgggaaggatgaggagaccaagatggctgaagtcctgttagggagagtcaaggagagaaggaagggatgttggatcaagaaggtccttgtaggtggtaaggacttgggatttataatttagctgttaaaattaggaattatgagcatcatcaatattaactgagcatttactccatgccgggctttctgtagagcactgagattcctagggcctggaagccggcttagctaatgggagagagtggaggaggtcaaacagacagtcacgtagagataaacttcaaagagaacaaatactttgtccagggacactctgggctgtgtggccactagggcaggggtggacatgagaggaggctgcgattagggcactagccagggagagaggcagcatggatgtgttttggatggtggaactgttaactgagacaaaggatttttgtatttttagaatcagcagtttcaaatttaggatggggccagggttgccaatagatacaccatcaacattatcattacaatcattacttatttttattttattttatttatttatttattagaggcagggtctttctctgtcacccaggctggagtgcagggctgtgatcatagctcactgcagcctcaaactcatgggctcaagccatcctcccacctcatcacgactatgataatgaagtaattaatatgtattatacttgttctgcacgtagctttctactggatgcccgtggcacggcatatctgcagggcaggcgtgatcaccttcccacattcctgatgaggcctctgaggcacagagaggaaaggggtggcctcctctcattctgtctgactgtggaatcagactagcctggacagaatccatcacaccacggccacctaatcctctgagccacagcttcctcatttgtaaaaaaaaaaaaagaagaagacctcgctcccagggtcggcatgagaattaaatgaacaagggaataatggccacacagcaagctcaataaacaacagcacaaaacactcagtcatcaagataaacaatattttcatgcagtatttgaaaaaaaaattcatgtacaaaaaaacgtgataaacaaaatattaaaaatttaaataaagacaggaccctatgagactgtgctgagctacatcagaccctcaggcaaaaggaaaagtgcgtatgaccctaagcatgttgctactgtttttttttttttctttgagacgaagtctctgttgccaggctagagtgcggtggcacaatctcagctcactgcaacctgcaactccctggttcaagcgattctcctgcctcagcctcccggttatgtattttttaatggttattttccagaaatagattttgaaaatattattgatgagtctgcttccactgaggccgggaaaataaaattataataaattctatttttaacacataaaattaacataagacattgcgagtttaatatagctatttttccttttttcaacatttttaaaactaatattctgtgggggtggggagtgaaccattaaataattacaagctgcgtgagagagctcacacctgtaataccagcatgttggaaggctgaggcgggtggattacttgagaccaggagttcaagaccagactaggcaagatagaaagactctatctctacagaaaatttttaaaaagtcagaaatggtgttgcatatctctagtcccagctactttggaagctgaaatgggaggcttgcttgaggccaggaggtcgaggctgaagcaatcttcaagaacaaatatttgctcagggacttctctgggctgtgtggccactaggtcaagagtgggctgtggacatgataggaggctacgattagggtaatagccaaggacagaggcaggaatggatgaattttggatggtaatactattcaccgagtcaccactgcactccagcttgggcaacagagcgaaacccagtctctaccaaaaaaaaaaaaaaaaaaaattgcacaatcacacggatatagggaatcacacttttttttttggcctcgggcttcagtacagctcagcacacattgggtttgatttaaattttgagtatttgttcatccattatggggggttgctttctgcgttcattttggttttcaaaaccattgtgttaaatattatttatcttaaataaaattaaccatactcaccatgtggtataatccccggaacgtattcctccttcatgactgaaattttgtgtctttggaccaacatctcccgtccctgaacccctcagctttctggatgactgtgcacctccgtaagcctcttcctaatccccaggtctgcctttgaggatatgacctttgagctgaaacgtgaaaattgggaaagaaacagccatggggactgtggggaaaggaaattccaattagaggaaaggcaagagtgaaggtcttggggcaggaagctttttcagggacagtgaggacagcatggccagggggtggtgggtaaggaaagcagcagacaagagccaggttgccaccgaccttgtgggccaaccacgggtagctttccttttaatccaagtgttctagagccaccgatctaggctcagttggcatggaaggtgggtgagagaatgacattatctgactcatttgcagaaggtctgcagcttgatttttttggaggatagacttatcatggggacaggagtgaccctcatcatcaagatgtgatagttatctagggagaggtgttggtacctggacgaaggtgaacagaagtggattgaatctcattacgtcatgagagtgagaagcacagaggatgacagaggatgatgtctacgtttcgagtttgggctcttgcagactgggtagtgccttttatagagactggggagacttgggggtgaggagtagaattttgagggggactgacaattttgatgtgaacgcgttggctgaagatgccaatttgacatccatgaagaggacctgtcccgaagcctcacattgctaaaccccagaaaatatcagttttgccagcccaatagataacatcaggggattctattttttgcatgttttctcctcaagagtccaaggataacccactgagtccgctcctgatctgaacctctaaggtattgccaggcctggtgtcctaaacatcagcccatgaggaaatcagccctgggccctgtaccaccaacacaacatcatgtcctgtatccccaaaacatgcaaaagtctcatgaacatgcacatcctctgtgcttccctcccctgaaccaccctcatcctcctttctaggtccttactgccacgcacgcgtgcagtctcatgaaaaaggggaatactgtgaccgcccctgtttccaaacggatattgggcctcttttcaagcgtacgttttcagtttacactttcagagtttgttgatttgtgagttcaaggccctctctgccctgcggagagcacggaaattcctggaactgggggcgtgtgtgaaggggacgttgtcaacgctaggacagagaagaaagccgctcattttgatgtgtcagagcggtggggggtggggcttccagcccctggcatctcagccctatccttccttcctgcactgtgcttctcacaaacagcaggggcttgtgttactttgagtcgatagcctcattcacgacactctcacagaatagtgcccgtctgtgctcagcacatgcccgtaaaacaggattccccaaacacgtccataggtaactgtaaatcatttagaagaatctaaagtgtgaattttgtaaactgaagctacgtgcatgtatacacgtgtgtgtttgtgtatatcatatatacacattaatgttattattattatttgcaatacccagcatcgcataataggtgggataatgcagatgccactccaagccaaatctcctggccccaccggtcataagcttacctctgtagggaagaaaaggtttctttttggcagtggtttgttgtttgtttgtttgttttgagacagggtcttattctgcggcactggttggaatgcagtggtgcggtcactgaagcctcgacctcctgggctcaagtgatcctcccacctcagcctcccaagtagctggggctacagatacgcaccacaacgcccagttaatttttgtattttttgtacagatggggttttgccatattgcctaggctgatctgtaactcctgagctcaagcgatctgcctacctcagcctcccaaagtgctgggattgcaggcatgggccagtgtgcctggcctctttttcctcaccaattgctaggttcatgactgaggcccctgtaacacaagacagatcaaccaaaaaaaaaaatcatacagatttatttagtataagttttatgtgacacgggagccttccacaaggaaataaagacccaaagaaacagaaaaacgtgtatatttgatgctggtctgatgaagaagtggatggctgtggagaagtatttgacagaggcagtgtgctctcatgctacaagagtgagagagtgaggggagcttttcaaggcctgtttgttcagattcagtgtcttcagagataaggatgctcctctcctacgggtacagagagggcacgctggaatgacagtcttacaattgcttcagagagaaggacgaggaaagctgagacaggcatttctgctcatgctgttttctcaaatgccaacgtgccatatttcagggtaccatgtcccgagccccaccatctcctaggtaggaattcaggattttggtgtttgtcctactagtaatgggaacccaacaggaagggaattccaagtgtgagaattccagccaaagcccagggtattccagggacccctcagtaagctgttgcaacactcggagccaggagatgctggtggccggtagggggtggtggccaggaccttagatggatgggccaccctcaggggaggttctgtggtacagggtggtggccaggacctcagatggatgggccaccctcgggggaggttctgtggtacggggtggtggccaggacctcagatggatgggtcaccctcaggggaggttctgtggtacggggtggtggccaggacctcagatggatgggccaccctcgggggaggttctgtggtacggggtggtgcccaggacctccgatggatgggccaccctcaggggaggttctgtggtacagggtggtggccaggacctcacatggatgggccaccctcaggggcggttctgtaggccacctcgcgggactccatgacagacgttaagcatggagcctggagaggaggaccccaggtggaggccctggtcccgcctttacgaatgggtagaaagggcttccgtctactgagacaggggtcttgctcaatctcactcacatggatgctccaggaagaaggagcccactcttcccacaaagaaaagaaagatggctgggggtgatggctcacgcctgtaatcccagcacttagggaggccgaggcgggaggatcacctgaggtcaggagtttgagaccagtctgggcaacatggtgaaaccccatctctactaaaaatacaaaaattagccaggcatggtggcgggggcctgtaattctcctgtctcagcctctcaagtagctgggattacacgtgcccaccaccacagcctggctaatttttgtctttttagtagagacagggtttcaccaggttggccaggctgctctcaaactcctgacctcaggtgattcacccgactcggcctccaaaagtgctgggattacgggtgtgagccaccgtgcctggcctaaaatacattttatagcctataagagtgtctcatttcaagcacagaccacaggcctggtatacagtaggtgcttactacagccttgtcgatctgaattctatcagctcttctcaacagttctataaatcaagaacaatgggtgttcaggactctaaacttccatacaaattctctggacatccccttccagcaaggtgctgttcccacccctccagaaaaacattctgtagctcctactgattatgggccatgagaaggagtgggagttttattctgagaaaatagtaagaactgattgcagagttaggcacgggaggcggatgctccgattttcctttgaaaaggatcagggcctttcgaaaagcaattgcggactttcaagggcagacgatctctggtcacggggttgtttgtgcagcggggccttcaggacgagatggatgggacgtgtgggctgcggggcaaggccgagccaggctgacgtcgcggaaagcagagaactgatgaatggaggctggctgtcttccttgagaccgggatcgtattttcaagtgtttgggtggcagaggcgttttagagggagagagagccaagaataaccagtccatgggcagagaaaaaggcaattcctgaaagggagggataacaagctcacacacacagagctgggagtggtgcccagacgcctctcccattcctggacccttagttgtcttttatttatttatctatttatttatttttttgagacagggtcttgctctgttgctcaggctggagtacagtggtgcagtcacagctcactgtagcctctgccgcccaggctcaagcgatcctcccacctcagcctactgagtagctgggaccacggacacatgctgccacacccagttaacttttttgcattttgtcggtagacacatggtctcaccatgttacccagactggtctcaaactcctggactcaaaaatgatcctcctgcctcggcctcacaaagagctggggtacaagtgtgagccacccaccagccctcagttgtcccatccatctcatcctgaaggccccgctgcacaaacaaccctgtgaccagagaacgtctgtccttgaaattccgcagttgcttttcgaaaggccctgatccttttcaaaggaaaatcggagcatccgcctcccgtgcctaactctgcaatcagttcttactattttctcagaataaaactcccactccttctcatggcccataatcagtaggagctacagaatgcttttctggaggggcttggaacagcagccttgctggaaagggacgtccggagaatttgcattagcgcttagagtcctgaacacccgttgttcttgctgtatagaaacgttgagaagagctgatagaattcagatcgacaaggctgtagtaagcacctactgtataccaggtgggaatgtaaaatgatgcaattactgtggaaaacactttgcagttcctaaaaaattaagtggagaatttccatatgacccagcaaccctgcctctgcatagagaccccaaacagttggaagcaaggactcgactcagactgatatgtgtacacccatatccacaacagcatcatttacaagagccaaaaggtgggagcagcccaaatgtccatccatggatgaagagaaacaaaatgtggtttgtacacagcagaatgtacaagctgagcatccctcatcggaaaatctaaaatccgtaatgctccaaagtctgaaaactttttgagtgcagacatgcagctcaacggtcgtgctcaaaggaaatgctcattgaagcattttggattttggattttcagattagggatgctccaccagtaagtataaatgtaaataatctggccagaggccgtggctcacgcctgtaatcccagcactttgggaggccgaggtgggtggatcacttgaggtcaggggttcgagaccagcctggccaacatggagaaaccctgtctctactaaaaatacaaaaattagctgggaatggtggcgcatgcctgtaatcccagctactcaggaggctgaggcaggagaatcacttgaaccagggaggtggtggttgcagtgagccgagatcgcaccactgcactccagcctgggcgacagactgaggccgactccatcccaaaataaataaataaatgtaaataatctgaaacctgaaaaaatctgaaatccaaaacactcctggccctgagcattttaggtaagggatactcaacctgtagttcagctgtaaaaaggaaggaaattctgacacatgctacagcatgggggaaccttgaggacatcatgctaacttaaattacgcagtcacaaaaatacaaagactgtatgatcctagttatatgaggtccctagaggaggcaacttcacagagacagaaagaaggtggcatggtggcagccaggggcttgggggagatgggatggagagttcatgtttgatggatgcagagtttcagttgggaaaacgaaggcgttctggagatggattcactcacccatgtgaatgtatttaaccccacagaactctacactttgaattggttcattttatgttacctatattttaccataatgaaaaaattaaaaataaagatgtacatgaaccactggtgaggtctctgcggggttaatcgtcttcatctccgcttccttgcaggtctgacatcagtagcgcttccatttccactcagcaacatttacctggtttttcatcataaagggcttaggctgttgccatggaaactgcagcaagactgggaaaggggagggggctgcgagggagcaaagagagagcttggagactggaattttccaggctctgagctcacgctgtatgcttcctttgtgataagtcactgagtgaaaatgtgggtctttgtccacaatagcatggtcgctcttcattcctcagtgagactctctcatggaggtgatgaacacacagcagtcagcccagtgccaaatctcctaagagccaggtttctctgtgggtcccctctggattgacacttgcgtatggaccttgggaaagagattctcatttcctcttcttattattttttaacttttattttaggttcaggggtacgtgtgctggtttgttacggaagtatattgtgtgtcgtgggggtttggtgtacagattatttcatcaccaaggtaaagagcatcatacccaacaggtagctttttgatccactccctcctcccatcttccaccgtcaaataggccctggtgtcttttgttcccttctctgtgtccatttgcactcattgtttagccctcacgtataagtgagaacatgtggtatttggttttctgttcctgtgttagttcaataaggataatgacctccagttctatccatgttactgcaaaggacacaatctctttttcatggctgtgtagtattccatagtgtatctatgctacattttctttctccagtccactgttgatgggcatctagattgagtccatgtctttgctattgttgatagtactgtgatgaacatacacgtgcatgtgtctttatgatggaatgatttatattcctttgggtatataccccataatgggattgctgagccaaatggtacttctgttttaagttatttgagaaatctccaaactgttttccacagtggctgaactaatttacattcccaccagcagtgtgtaagtgctcctttttccccccagcctcaccagcatctgttattttttgacttttcaataatagtcattctgactagagtgagaaggtgtgtcattgcggctttgatttgcatctcacaacccctttcagaagtgcttaaagtatatgaacagatattttttcaaaagaagacatgcagatctgggcatggtggctcaggcctgtaatcccagcactctgggaggctaaggcaggctgaggtcaggagttcgagaccagcctggccaacatggtgaaaccccatctctactaaaaatacaaaattagccgggcgtggtggcggacgcctgtaatcctggatactcaggaggctgaggcaggagaatcacttgaacctgggatagggaggttgcagtgaaccgagatcttgccattgcactcaagcctgagcaaaaagagtgaaacttcgtcaaaaaaaaatatatatatatagaagaagaagacacacatatgaccaacaagcacatgaaaaagacatcgttatttaaggcagactctctccaattatttaagtttgaaagtctttacaaaaggagcaaaaccatttctactctcctccttagcatgttgacttctaaaaacaggctttgtgccactgaaacgtgagtcaagtacagttttgggctaattgtttactagctggtttatataacagtaactctaactgtggaccagcaaccacaataacaaaaagcacttgctgggcttaatgactcacacctataatcccagttctttgggaggctgaggcaggcagatcgctggagctccagagtttgagaccagcctgggcaccatggtgaaaccctgtctctacaaaaaaattaaccaggcatggtggcatgcacctgcagtcccagctacttgggaggctgaggtgggaggatggcttgaacccgggagacagaggttgcagtgagctgagattgtgccattgtgctccagtgcaggcaacagagtgagagcgtgtttcaaaaaaacaaaaaggaattatttattcagccagtcacttcatgtatgagttatctattgctgtgtaacaaatcatctgaacttagtggtggaaactacacatattaactgagactctgtgtgtctcatgaggctggagtcaagacctcagctgggcagttcctttcaggggctcagagtcctcctccaagttcaccaggttgttggcagaattcagtcatttaaggctgtaggactgaggtcccacatttttgtcagtagttttttgctgtgtggcctcctcgcaacatggctgttcacttcatcatgtgctgatcattgccttttaaaaaatcatttgtagcttgcacagtggtgcacacctgcagtcccacatacttgggaggatgaggtgggaggagcgcttgagcccaggagctcaaggtttctgtgagctatgatcacacctatgaatagccactgcactgcagcctggccaacatagtgagacctccgtttcaaaatgattacttaaataattaaaaaatcatttgtgactccagctgatttagaaatatgccatctgattcttttcttattgcaataaaatatacataatatccacaattttgaccattttttagtgtacaattcagtggcattaggtacagtcacatcgctgtgcaaccatcaccgccatccatctctagaactgtttcatcttcccaaatggaaattctgtctctgttaaacgctcattcccctttccccctcccccaggtcttggcaaccagctttctactttctctctatgaattcagcaactccaggtacctcgtatcagcagaatcatacgatatttgattttttgtgtgtctggtttatgtcacttggcatagtgtcctcaaggttcctgactgacacaggagcctaatttctggccaatgtccttctccaggggaagatggccgctatcgggtctagagtagacaatggatgaagagaactagaatgacttaagattgatccagatggtgggagatgctcaaagcttttgtgagaacgagaaggaaagcacagggaggaggaatactgtaactgaagctggtgcattctgaaaacaagagtcacaatgtgagcataacaccagccccgccaagtgccctcctgattcatgagtaaaatgcccaacgaagcccaagagctatgaacggaaccatcaatcaaagagacttaatggttttcttggaagcagctcagcatagcgaatgatgttgagacacccatttccaatatattaaaaggtgtcaaatgttcacagtctttttggcagatagtgtctctggaacattctttaacaagctgtctgctaattttaagagcatctgatcttattctcatggtttgaggcatggtggccacggttgggaacggccatcactgtgcctggctcagcaaacaccacctcgggtggtgccgcagctggttctcgcatttcaagtctatgagatcctctctcaccacttgcgtgaaaatagctccctaccccaatcctccacattaatttgggacttaacttttctcaccctctgacagttttttttcctgtttctgtcactagaatgaagcctttcggagggcatgggctcaccggaatcctgtgtgtagcaggatgcctagcacagagtgggaatgctaaatacttgttaaaggagtgaattaatatttggaaggaatgaatgactcttctgattgcctaagtcctggaggagtagagatggtgcccgttttaacttcccttttatcctgcatgcttagaacagcatctgatgcacaactggtgtctgttgactgactcgatgagtgaatgagggaacaagtaatgtctagaccaccggagcctgcagtagagtagtgggtcccggagacgtccacaggacaagtggggccgcttccccgacctcgctcccattccgcaacgctcctttgtatttgaacataaatgaagtaggggcgagggcctgcaggctggagaacctcccctggtcctttcatcccctcctaacccaggctgggttaacgacagcggccccatcttggtccttcctcggggctcttgtttcttagcaacccaggcaaactccatctgttaccatggaaactgcagccgggatgaggaagtggaggtggctgaaaatcagtagacagaacctcagaggatggaatattctggaatcttgtatcagactgagtgtgcacttaaaatttttagcttagaaccgactcgtttctcatttatttttgtgaataaataaaactgtgtgttcttgggcaggtgtttccatctctccgaggcatgagccaccaagcccggcttttttttttttttttttttttttttttttgagatagggtcttgctctgtcacccaggttggagtgcagtggcatgatcagagcttgctgcagcctcagcctcctgggctcaagtgatccttatgcctcagcctcctgagtagctaggactatgggcacacgccaccactcctggctaatttttaaagtttttgttgagatggagtcttgctatgttgctcaggctggtctcaaactcctggcctcaagcaatcttcccgccttggcctccctaagtgctgggttcacaggtgtgagccaccgtgcccagcctacctgggattacaggcatgagccacgatgcccagccgactaattcagtttctgaggaccccaccctcatgatctaatcgtctccaaaggctccacttctaaacaccatcgcacttggggttaagactttgacacatgaattttgggggcacattcagaccatagcaaacccttagctcgggatccgtgcttgatacgtgttaatgattttgaacttcattaagatgaaaataagagaagacgcgatgaaggcagctgtcactggtctcggtgttcactgtcctgggatctgcccagccgaggggcttcattactcatcggagagaaaagtgagtgggggactcccactccttggggctcagttctttattctttcaataaatgcttcatacaggtctactgtgtcagaggtcatggttaagaaccaactccaaagactggaaaattccagtttccggggccctcccggccccttcctcagctccccccacctttccgccctccagctgcagtttccatggtgatagtctgagcctccctctgttgctaagggcagataaacggtcaggagagggagcaggtcacataggttgattaatctccctgagagatggtggtgggcatgggaggggaggggaaggaaagagggaaagagacccaaggggctcaagtctgcaaacccccatctatcattcatgcacagcctttgcgtgcctttgaataggggtttgcagaagaagagaaatgtgcctgtggagagaatattttaaatgtattctctgaaccaggcggggtgggtcacgcctgtaatcccagcactttgggaggacgaggcaggtgggtcacctgagatcaggagttcgagaacagcctggccaacatggtgaaaccccatctctactaaaaatacaaaaattagccgggggcggttgtgggcacctgtaatctcagctactagggaggctgaggcaggagaattgcttgaactgggaagcggaggttgcggtgagccaagatcgccccactgcactccagcctgggcaacagagtgagaccctgcctcaaaaaataaataagtaataaataaaatatataaaataaaataaataaaaaataaaatctattctgttagcaatttgaaaacacacaatacattgtgtgaggtgatagctgtgttaattagcttgagttcatcattccacaatgcacacgtatattaaaacatcacatcgtactccataaatatgtacaataagtatttacctattaaaaataattttttgaaaagatctcacatacatacaaacaaaaaaaaaacccatgcatgtgagggtctctgcagagtcagttagaaatcacgtatctcctgcatcttctggcaataacagcattatctatcatcagaattcaagttatctgataaacattgactgagactttctgcaggtcaagcccttgtccgtgggcagaaaataaatgtccggcaaatggggccgagcctgccttcctgcgctctgtttgtgtgggaggtggatccattcattccaaaagttagatcatttatttttaaaagatgttgattttcttctaggaggcaggtatcatgctagacattggggaaacagcaaggagtaagacaggccttgcaagggctgccttgcagcaaaggagacagaaaatgaactcacatatttcacgtattataccatcagaaagtccattaggcctatgaagaaaaatacagcagggaatccaaagatattaacacggcaggactgctttagatgcaggatgctaaggaagtggtgatggctgagcagaaagttgagtgagggagagagtcacattctcaggactctctggggtaggaagagggggacagatgggagtgcaaaggccccgaggcaggaagaggtaaagcaggtgcaaggaattccatggcaaggaattctttgcacaagaacttaaaacagaactaccattccacccagcaatcccattgttgggcatatatccaaaggaatacgaattgtcctaccataaagacacacgcgtgtatatgtccatcacagtattgttcacaatagcaaagacgtggagtcaacctaggggcccatcagtggtggactggataaagaaaatatggtacctgtgcaccatggaatactatgcagctataaaaaagaatgaaatcatggccttttgcagcaacgtggatggtgctggaggccattatcccaagcaaattaacaggaacagaaaatcaaacaccacatgttctcacttttaagtgggaactaaacattgggtactcatggacataaagattagaaaaatagacactgtagactactagagggaggagggagggggtaaggattgaaaaactatctattaggtactacgctcagtgcctgagtgacaggttcagtcataccccaactctcagcatcatgcaatatatgcatgtaatagacctgcacatacttgtttttctgatttcaccagtttttttcctcgaggtatcattctatgaaagtgtatctcattcatgtgactatcatcatatccgaatacagaactgttctatagccacatatacaaacaaaaaataaaaacaggccgggtgcggtggctcaaacccgtaaccccagcactttgggaggccgaggtgggtggatcacccgaggtcgggagatcgagaccagcctggccaacatagtgaaactttgtctctactaaaaatataaaaaattagccgggtggggtggcggcgggcgcctgtagtcccagctactcgggaggctgaggcaggagaatggcgtgaacccaggaggtggagcttgcagtgagccgagattgcgccactgcactccagcctgggcaacagagcgagactctgtctcaaaaaatatataataaaataataaataaataaataaataaataaataaataaataaataaaaaggagagagaaaaatggattagtgcccttataaagacagcctagacagaaaatccgtttctctaccatgttaggatgcagtatgaggatgatgatgacctgcaaaccaggaagaggcctcaccagaaacagaccatgctggcatcctgatctcagaattccagcctcccaaactgtgaggagtaaacttctgttgttgataagccatccagtcagtggcattttgttatggcagcagcccaaacagactaagagctttcatggattttctcaattagtcattccaccaaccctatggcgtatgctataattatctccatttaacggatgaggaaactgaggcttggtcgggaggtccaaggtcagacagcttgagaacggcagctcctggagtcagatccaggatggtggcatccgaggcagaggatgagaactggaggtcacggggagagcttctgtggattctggatgggagagaggagcggtgacagtctgtgctgcagggcgagccttgcctgacctcccttggatgcctcaatctgcttctgcctgctgcttgctctctcatttcatcctctataaaataggatgcagcagcaacaccactttttttttctttttttagacagggtcttgctctgtcgctcaggcaggggtgcagtggcacgatctctgctcagctgcaacctccgcttcctgggctcaagtggtcctcctggctcatcctcctgagtagctgggactacaggtgtgcaccaccacaccacaccacaccagcctaatcttttttttttttttttgactcagggtttcacctttgttgcctacgttggtctcaaactcccaggctcaagcatttcgccaaccttggcctcccaaaatgctgggattacaggcatgagctaccacccctggccagtgataccacttctgtacagaagtgtatttcttgcaaaatttacagaagtatatttgttgcaaggtttgcaaaagtgtattacagaagcgtatttgttgcaaagtgtgcagaagtgtattcatcgcgaggggttacaggagtgcatttgtttcctagcactgctgtgatgaagtactacagactggatggtttaaagcaacagaaatgtattctctcatcgttctggaggccagaagtctgaaatcaagttgttggcagggctggttcctcctgaggactttgagggagactcttttcgtttcttgctttttccctagcttttggcggtttgctggcttgtagatacatcatcccaatcccccatctttacagtgtgcctgcgttcacctggctgtcttctcctaaaggcatctgtcctgtgggatcagggacccagcctactacaggaggacctcattgtaactaattgtatcagcagtgaccctgttttcacattctaaggtactagtggtcaggacttcaacatatgtttttgtgggatatgaaatccaacccataacgaggaggtagagtgtgtgccagtgttcatcactgtttgcagcacatataatagtaaactctccatgaaagctctatactaggctcagaagggccctgaggacaccacgattatacacattcatttgtttttattttgtagttctgatgaaggagctggacacccttgccccagcctccagtgccatctgcccagacggaaggatgggaagagtgtagacatgaaagttgagtctcagaaaaggtagaacccaggctgggagtggtggctcactcccctgtaatcccagcactttgggaggccgaggtgggcggatcacctgaggtcaggagttcaagaccagcctggccaacatggtgaaaccccatctctactaaaaacacaaaaattaaacagacatggtggtgggtgcctctagtcccagctacttgggaggctgaggcaggagaatcacttgaactgggaggcggaggttgcagtgagctgagatctcaccactgcactccaggctgggtgacagagcaagactctatctcaaaaaaaggaaaggaaaggaagaaagaaagagaaagagagagagaaagaaagagaaaagaaggaaggaaggaaggaaaagaagaaagaaggaaagaaagaaagaaagagagagaacccaggtgaggcacaggacatgtgtggtgaccaggcttgcccagcagtgtcctaatcccccacccagcctttggcacacagggcctttaacagagggattggaggtatgaagtgggaacaggaccccaaggtggggccgttgtaattggctatgaaaaggcaatgggtggtgacggcgggactggagagaaggggaatgattgagaggttcatggggagagggtggatgcaaaagtggaatcattgagaggttcatgggaagcaggtggacgtagaagagatagaatcgatggtggtattatgggttacagtgtatcccccaaagagaggttggcatcctatcccctggtacctgtgaatgtgacctccgttgaaaataaggtcttggctgggagcagtggctcacgcctgtaatcccagcactttgggaggccgaggcgggcagatcacgaggtcaggagatccagaccatcctggctaacatggtgaaaccccgtctctaccaaaaatacaaaaaaaaaaattagccgggcgtggtggcgggcacctgtagtcccagctactcgggaggctgaggcaggagaatggcaggaacccgggaggtggagcttgcagtgagctgagatcgcgccactgcaccccagcttgagcgacacagcgagactccgtctcaaaaaaaaaaaagaaaaaaaaaaagaaaagaaggtctttacgggaggtagccacattaacatcaagtcagttgggtgggctttcacctgacatgactgatatcctcataagaagaggagaggactcagacacagaaggaagaccatgttagatggaggcagagattggagcgatgtggccacatgccgaggggcactgggaactgccaggtgctagaagatgccagaaaggactctcccttcaagccctcgcaggcagcatagactcgcaacgccttggtttcacagcttgagcttccaggactgtgagagaacaaatgtccattgttttaaggtgcctggtctgtgatgctttgtcatgagagctgcggaaaacgcatgtgggtgggtgtccaggagaaggagtgtaggattctcccaggggacgaagtggtcagagaacaggttacactaggtggcaaagggaattaaggatacaggtgggagtaaggttgctaatcaatagaccttaatatcgggagatgatcctggattatccaggtggaaccattgtcatcacaaaagtttgtttaaaaggcgttaaagaagccagagggatggatgtgagaaggactcagccaaccacgctggccttgaagagggaagctggagccctgagccagggaatgtgagtggggtggtccccacaagctggaaaaggaaaggaggcggattctccccccacaccagagactccagaaggaacgcagctctatggacaccttgatttcatcccagtgagacctgggcgggatttctgacctccaggactgtaggatagtgaaggggtattgtttttagtgtccgagtctgtggcgatttgttccagctgtgacaggaagcccacggcggcgtaagcaatgctgcgtggtttccaagactgggtcagaaatggggtaaaaccacgtccagactgtcctgggaacgttcctttgcagctggggtaagacgtccagctgggcagaagtggccacgcaggaaaggctgtttgggaggaccacccagaggtagagatgctgggtgtccagccatcccagtgcccagtgcccacctcctcccaggtcgggcatgacacgtgggcgcagacgccttcaaaaggactcagccctgagcgtcatcactgaccgcagccactggagagggcatgagcgagaacagaggtagctgagcccagtcacaaccaagaaacagagagagaatagcagatggtgactgttgccttaagccagggtgcgagctgagggctggctgctttttgcaatttaaatttttatttaattttaattttaattgtttttttttttcagacagagttttgctcttgtgtcccaggctagagtgcaatggcacaatctcggctcactgcagcctctgcctcccaggttcaagagagtctcctgccgcagcctcccgagtagctgggattacaggtgcaccccaatatgcttggctaatttttgtatttgtagtagagatggggtttcaccatgttggtcaggctggtctcgaactcctgacctcaggtgatccgcccgtctcggcttccaaaagtgctgggattataggcgtgagccactgcacccagcctaaaattttatttttaattgacaaattgaaaccgaagggttaatctgaccaggtctgccagctccgcttgctttcaggcatttgttttctgttattttttgttcctctttccacaaagctgaaggccatagtagctgaaggccgcaccgctgactgctcagatttaaccttcactggctattggatagataacattcattggtcaccatggtaatggttgcttctgttgttcaggaacctgggaaatctcccatcaagttcaaaccggttgagaccaccagccctccaagtgggcccctgcaaatgcctaagagatggctgggttttttttgttgttgtttttgttttttttttatttttatttcagtagcttttgaggtacaagtggttttttgttacatgcatcaattatatagtggtgaattctgagattttagtgcacctgtcactcaagtcatgtacattgtacctaatatgtagttttttattcctagtaccactcccaccctcttcctcctgagtttcttttctttctttctttcttttttctttctttcttctttctttctttttctttctttcttttcttttctttctttctttctttccttctttctttcctttctttctttctttcttttcttttctttctttttttactgagacagagtctcgctccgtggcccaggctggagtgcagtggcgcaatctcggctcactgcaacttctgcctcccaggttcaagcgattctcctgcctcagcctccagagtagccaggattacaggcacacgccacacgcacggctcattttgtatttttatttttagtagagacggggtttcatcatgttggccaggctggtctcgaactcctgacctcaggtgatccacccaccttggcctcccaaagtgctggggttacaggcgtgagccaccgcgcccggcctcctgagtctctaaagcccattccatcactctatatgcctttgcagactcctagcttagctcccacttacaagagacagtgtgcactttttggttttccatgatgtggggaaagggagtgtgaatacactgctggagagatggccttttgacctaagcggccaaaaactccaccctcagatcatgccagcactgccatttccagtacacgtgtcctataaaatgccatgaagcccgacgatgcttgtgcagtacgcaccagtcacttcattttcgccactgtcaatcacctttccgcaagcctcaggccaatccactcccccaacccatacatctcccaaagactcaccttcagggatgcagatctgagagatgttctcccacctccttccttggtgctcttgcaaataaatcttttctcttttgcaaagcctgtgtcagtgattgatttactgtgtgtgcacagagtggacctggacctgactggtaacagaatgaaacgtgtgtgtgtgtgtgtgtgtgtgtgtgtgtatgtgtggtacaatatgatgttctgatctaggtatacatttggaatggttatatcaagctaattatccatcacctcacctacttaccatttttgtgatgagaacatttaaaatctactcttagcaattttaaaatattcagtacaggccgggtgcggtggctcacgcctgtaatcccagtactttgggaggctgaggtgggcggatcacctgagttcaggagttcaagactagtctggccaatatagtgaaaccctgtctctactaaaaatacaaaaattagccaggcatcgtggcggacacctgtaatcccagctacttgggaggatgaggtatgagaattgcttgaacccaggaggcggaggctgcagtgagccaagatcgtgccactgcactccagcctgggtgacagatcaagactccgtctcaattaaaaaaaaaagaaagaaaaagagatagaaaaaaaaaggttgatcaaagggtacaaagtttcactcagacaggagaagtaagttttagtgatctatcatacagcatagcagctgtagtgaataataacacatcgtgtatttcaaaactagaatagtagattttaaatgttttcgccacaaaaaatgataagtaggtgaagtaatggatacgttaattagcttgatttaatcattccacaatgtatacatatatcaaaacatcacgttgtacccaataaatacatacaattattacacgtcaatttaaacatttaaaaaatctaatctaaaatgctgtggaatatttttccctaacagtaataatcaattggtattactcaaatgtctatattaactatctcgttcatttgttgtttttccgttttttttttttgttgttgttgttgctgtttttgaggccatggatttttttttttttttttttttgagattcgagtctcgctctgtcgcccaggctggagtgcagtggtgcaatctcgcctcactgcaagctccgcctcccgggttcacgccattctcctgcctcagcctcccgagtagctgggaccccaggcgtccgccaccacgcccggctaatttttttttgtatttttagtagagacggggtttcaccgtgttagccaggatggtctcgatctcctgacctcgtgatcctcccgtctcggcctccccaggtgctgggattacaggcgtgagccaccacatccggccgaggccatggatttttaagatgcgtattattcgaggcaccatgataaaagaaaaatgctgtttactaaattatgacaaacgttttaaaatctaaaaaatatgtcagaataaatgagatccattattctcttcctcaaacacctgttgcttctttctttgttccttgtctagaaccttattctgtggtgttggtaacgtctttatttggaaaatccatcccggactcagtgcagggcctgcgggttagcaggaactcacagatcccggactcactgcgtggcctgcggtttagcaggaactcatagataactgccgaatgtgcaaatgcacaagggatgcatttcacttctgaaaaatgtggatcactatgtttacaatgtctggcctcctacctcttttagaaaattttaaaacttaaaaatttaaattaggggccaagcgcggtggctcatgcctgtcatctcagcactttgggaggccaaggcagatggatcacctgaggtcaggagatcaagaccaatctggccagcatggcaaaaccccgtctctactaaaaatacaaaaattagccgggcatggtggcaggcgcctgtaatcccagatactcgggaggctgaggcaggataatcacttgaacccggaaggcagaggttgcagtgaaccgagattgcaccgccgcactccagcctgggtgacagagtgagactgtcacacacaaaaaaaaaaaaaagaaaaaagaaaacaatttaaattaaaaattatattataagcatatcacagaacatcagctggcctggtacttagcaagcatttaagaaacacttgccactattattaatactgttcttgccactttttaaagtcaccagattgagcaaataaaaattcaggctgcccagtaaaattcgaatttcagataaacaacaaatactttttgtgagattgcatagtttactgcccattgccaacatggatgcatagagttgatgcttaaaggtatgcaaaatttttatactaccaatatttacataagtattttgtcaaaagaaacaacaaattcttcaattaatttctgaagagtctacttacacaggcacgaaaacttattttaaatgtcttcagagtataggaatacaacaatttaagaataattttaccacaagagaaggtataaatagatcaaacaattttcttgcacagggtaataacattttaacaatacacaacatttttaaaacaaagattgtcttaagtggcaacccaattatgataattagagagataaatctgtaacaaatatcataaataatttttgaacacagagtgctgattctctttttatcatggttttttttttttacataaaagaaatttctttatattttcccaccattgacaatttatatacttgggaatgagcctgtttaaaaaaacaaaaataaagagtatttgccatgaatcaaatccgagtaacctggaaaaaaatctgaaaacttgtaatcaatatatttttacttttatgattttagactgtggtaaaaaccttatgcattctgcaataggcatcttgcccattactacaagaaatgatccttacatttggataaacacaaaatacccctcgtaatcagttcaaatacagtctaatactatatattatgaaaagtaggaagtatggtaagcaaagctagtacagttctttttcaaacctcaggcaagctgaacaaaagcttttaacctcagagtaatgaaggacaggcatcagtttcataaaatgatagatggctgtgacaagcaaagatttgtgcagtttttttgtttcatttaagaatgtagtgcaatattaaagtttaaagtttgttcaaaatgacagatcatctggaaactaaattgtagcaattgacatcttttagctggaaacacttaggaaaaatcaggtttgcttgtttttagttgaaaatgtcaagatttacagccatggagacattggatgaatctggaggtcagtgtgccctcaggatgtgtctttatgagcaattgttcaagattaaaagaaaatttatgctagaaaattgtgtttttctcggactaaaaatactacatcaggatgggcacagtggctcacgcctgtaatcctagcactttgggaggccaaggcgggcaggtcactttaggtcaggagttcgagaccagcctgaccaacacgttgaaaccccgtctctactaaaaatacaaaaatgagccgggtgtggtagtgcgtgcctgtaatcccatctactggggagtttgaggcaggagaattgcttgaacccagaaggtggaggttgtggtgaactgagatcatgcctctgcacttcaacctggatgacagcgagactccatgtcaaaaaaacaaaaaaacaaaaaaataccacctcagtttataagcttcctgtacaagttggaagaccctgctgggctgtatccctcccctgccccatctgctcctctccctgtctgcattgttcctttgcatcgcattgaagatctcaggccctcccgtaggatggagcaggaaagattcaggctagacatgtccccatcaacccccacccctacccactgaaccctggaactatgagcagaaaccacaccgctccttccccaacagaggtttcctgctgctatgtggccaaaagagagtggggaggaattctcaggacacccagaggtggtacagtccaacctgaccacagggagggaaccccggcccacacctgccctgcccaggtgagtgtgtagaggggcgtgagaaggaggtggtccaagtcctccctgattcaagaaagctctgaatttcccctgcaatgagcttagtagaattcagagacctacctgtgacaacagagactcagagtgctctgagaagctcttcattcattcattcattcatgccattgatatttaccttgctaggcactgggaatacgtgggtaaagacacgtattcctgccctcatggggcttctattccagcagatgagaagccgaccagaacaaaaatcaatcagagtcattgctaatagcagtcactcactacacaccatttgacatgtaaagcaagctgacatgatagtggttgtgggagaggtggggagaatttctctaagaaggtgacatttcagcaaacctttgactatcaagaatgacctatcaggaagaatccaggcctgggaaaatccagagagagcgagacaggggagggaaacggcaaactgccaaggttcagaggtgggaacgagcgtgcacatccaaaggactgggcgaaggctggtgcctctggggagcagggttacgtggggagggtcggggactggagctggagcgattgtttggagcccggtaggcgctatgtgtgtttactgactgtactagagatttttttttttttttgagatggagtttctctcttgttgccccagctggagtgcagtggcatgatctcggctcactgcaacctctgcctcccaggttcaagggattctcctgcctcagcctcccgagtagctgggattacaggcatgcaccaccacgcccggctcattttgtatttttttagtagagataggggtttctccatgttggtcaggctggtctcgaactcccgacctcaggtgatccaccaacctcaagtgatctgctggcctcggcctcccaagtgctgggattacaggcatgagccactgcacccagcccttttttttttctttaatcaagatctctgtcccacaagactcccatgggaacatgggctgtatgaattttccaggggctgacatagcaaagcactgcatgctgagaggcttcaacagcacggatttgttttctcagagttctggaggctggaagttcaaggtcaaggtgtagcagtgttggtttcccctgaggcctccttggctcgtgcacggggtcgtccctctgtgtgtgtctgtgtcctaatctcctcttcttataaggacacacacccgttgaaagagggcccacacttaaatcctcattttaaggtaatcacctctttaaaaatccagccccaaatacaatctcatcctgagatactgagggtcagggcttcaacatatggatttcttttgagggagtaggacacgattcagcccataacaaggacagagctggcttgcgtttgacgatcattgcgttctgcgtaccttgaaccgttcctggcagaaggcaaggactccagcaatacatggagtgggcgggtggagagagcagataatactgatttcagtaccactcagagggcactgtgaccgccaaccgtttgcagaggcgtgcgcaactgtagttctgcagaccttggctcaggacgtgctttagtgtgcccggaagaggcacctgtgtccccggctgaggcacagcaggcctggcctctcaatcctcctctgccatccgtccaccctgtcctcccctagggagcacctacctggtgggaccactgaggcgggctcgggctgtcaccagggaaaccgcagcagggtgcggaaggcgagggggttgaggaatgaaaagaggaagtccccaaaaccagacttggagggtggggactcaaaacttcagcttggcacaagtaggtacttaataaacgtttgttgaaaaaagcaataagtacctttcaaagcattacctgtcccaagtgtgtctggactgaaacaagaacgtcttttgttgcaaagcaaaatgctctgtgaccagctcgtacggatgccaggagaatggggatcttgtttgttctctgccaatagaaatgtattagtgaaagtaagactttaaaacctcagcactaagtggtttcggcattgactgagtgcccagccgctgtttgagccacgtggatgtgctcgttttattcttagagttactgtgtgtgcattctgggaggccagcggggaagtttccagaaattgtaagaaggtaatggcgaaatggatggcttaggaacacaggcaacacctcggctgagtttgaggccacggtccgtggctccggagctcggcgtccagccaggatgctggactgcagaatatgccaaccttcttctagacccatttccagtgttttaaatgctgatagtacacgctacctcctattccctacatgtcctaggtgggtgttcataggcacataccataaaataaaaaataaatatcatgaaattaaaaatcatacaacaaatcataaactaaaaataacattaataataataagacccacgtgcaaagaggggggaaagccttcccgcagggtccttgcgcattgcttcctcccacgtgaccccagacgagccgcctcacttctctgagtctctttccacttctgatgcagacaatgacgccacgcgtcccaccccacagggcggctggaaaaaggaaatgaatccgtgcgtgtggaaacgcttgggatagtggcaacacatgctccttatgacatcgtgtcagagaggtgtttgcacatcaagcttacccaaatcttcactcctgttttcagcagagctgcccaaacctcaagacggtccttccttcccctcctcctcttgcagcccctgcattccatccctgactcttccgcgagctgcagcaggaaggattcaggccatacacatgaaggagcaaggctacccctggggccaaggccacccctcgcccacccccgtctctcccaccccgggtagccgtcactgccgcagagcagggggaacgtgtcccaggtcactgcaccctctgctgtgtagggactggggtcatttctgaccgaacatcttactctagggcctgagattcagtgtcgtgggggactgagtctgaatccttcccgggcagggctcaccagcagaattcagatggaaactgtagagtgctgtcagcaggggtgtgctggagccagcttctactggaggacaggaaccaacgcgtcaactcgcaggaagtttgtgagatgtttaagcacatcgtttagtaaacaggacactccatgcactttcaaaattaaataaatgacgtaagccgggcacggtggctcacgcctgtaatcccagcactttgggaggctgaggtgggcggatcacctgaggtcgggagttcgagaccagcctgaccaaaatggagaaacccccgtctctactaaaaaatacaaaaattagctgggcgtggtggcgcatgtttgtaatcccagctactcgggaggctgaggtaggaagatcgcttgaacctgggaggcggaggttgcggtgagccgagattgcaccattgcactccagcctgggcaacaagagcgaaactccgtctcaaaaaaaaaaaaaaaaaaaaaaaagacgtaaagaacaaaggtaggaaacaccctaaacatacgctttcctagttatttaaatacattttactagcgtctgtgtttgggggtgattgacatccattgtgtctgcagtagatgtgggggctgctgacctcctcccacctccatgcccagcgagcaggccggctcctgcagctgcccatgctggggaggcatttgcaccatggaagctggcaaacaccaccgggcacgccaccccggcctccagagttggctgtccagcattcaccagctccccactggctgcaggaatccaattctttactctttcgggtgtaagtgcttatttaggaagccctccggtaggctggtctgtgctccacgcatcggggtacaacggtgagcagaactgcaaagagcctgtctttctgcatcttccattttgtgagaatgaaaagaaaataaacataaaactcaacccaggaagaagataatttcagaagattctaagtgcaagaaagaaacagagtgaggtgatactaacgggcaaatgttactttcttttttttattattatactttaagttctagggtacatgtgcacaacgtgcaggtttgttacatatatatacatgtgccatgttggtgtgctgcacccattaactcgtcatttacattaggtatatctcctaatgctatccctccccccctccccccacaacaggccccagggtgtgatgttccccttcctgtgtccaagtgttctcattgttcaattcccacctatgagtgagaacatgcgttgtttggttttttgtccttgcaatagtttgctgagaatgatggtttccagcttcatccacgtccctacaaaggacataaattcatcattttttatagctgcatagtattccatggtgtatatgtgccacattttcttaatccagtctatcattgttggacatttgggttggttccaagtctttgctattgtgaatagtgccacaataaacatacatttgcatgtgtctttatagcagcatgatttataatcctttgggtatatacccagtaatgggatggctgggtcaaatggtatttctagttctggatccctgaggaattgccacactgacttccacaatggttgaactagtttacagtcccaccaacagtgtaaaagtgttcctatttctccacatcctctccagcacctgttgtttcctgactttttaatgatcgccattctaactggtgtgagatggtgtctcattgtggttttgatttgcatttctctgatggccagtgatgatgagcattttttcatgtgtcttttggctgcataaatgtcttcttttgagaagtgtctgttcatatccttcacccactttttgatggggtggtttttttttcttgtaaatttgtttgagttctttgtagattctggatattagccctttgtcaataggaagaatcaataacgtgaaaatggccatactgcgcaaatattactttcaaaaggaggtcaggaagacttcctggaggaggcgaatgcacggtagcactcactcccaaagggtcggaagtacccagtaatgggaagatctggggaagaagttgtgggcaggtgcaaagtcaggaagaagcctgaggtgcccagacaacacagcggcacataatgagtggtggggagagagataggaggggaggctgctaggtgctcagcagaggctgcgttacagatggaccctgaagatgggggtgaggagacttgatggcttgatactgtttgatagcactgacagctattggagggtgatgactcaggaacttccctcaccaataagcgtttcttaaaaaaaattactctgactctacaaatatatatgtatatataatttaaccacattttactagcatctatgtttgggggttactgacatctctctatctatctatttatctatatatttggaggatcagagtaatttttaaaagaagtgtctatatataatgtatgtagaaataatatataaataaatacctatataaagtaattatatatttttatatttttatttatatatttcacttaaaatatacatttttaaatatatatgttttgttttgtttgagagagtcttgctctgtcaccttggctggagtgcagtggcaccatctcggctcactgcaacctccgcctctcaggttcaagagattttcctgcctcagcctaccaagtagctgggattacaggcacctgccaccatgcccagctattttttttttttttttttttttgtattttagtagaggcagggtttcaccatgttggccaggctgttctcgaactcctgacctcaggtgatccacccacctcagcttcccaaagtgctgggattacaggtgtaagccgctgcacccagctgaacccacctttggaacttagtgagtgtctcgccctaagtgcctgtcagctggggcacttcctctgtgccctacaaatgttcctcaaactgaaattctttagaacaatgcaggaagaatcccatgcaatggcataaagcactgtaaactatttcacttttattactccggaaatttatattgctttttattttccgtaacctgaagatatatgtgctagttccttggggctgggacattaagataagttgtgtggtccttccttccaacacagctaccaccctgggctcctcctctgggcacactgtgggcgcctgctgctcgcaaactgtgataaggaaggagctgttttttctaagatcactgggatccattaagggctccgcaggagaaagacagaacttctctttaggatgatgaaagatgagggtgtcacaggtggtgactcaaacaacaattgagaggcaaaggggtctgaacccatctgcaaataaatatcatttgaatgaatgaacgagtgtatccaggggtgaagcgggaacagaagtcatggtgaaccactgacaggaggaccgtggtgggaacccttcctgcgctatgaaggcagagttgaggtgctgtagcctagactgtagggaatcccttttgccacatcaggtgacacccactggttctagatactaagatgtggatatcactgggggaccatcattcagcccaccacagatggatgagtagagaggttaatggatggaaggatggtaggtgaaaggatggatagtagagtagatggatgaatagtaaggtggatgattggatggaagagtgaatggatagatgggtatacagattgatgggtggtgggtggatgattcctgtgatccctgcctcgcttctcagctaagctactctgatgtccatcactctgacctgtcccccgacagacactctcacttggtacagacctcagaagcaggctctggtggtcaccatggaaatgcgattggatgaggaaggtaagttgctgaggagtgggcagagagactctcagatgctggaaatttccagactctggagtgaaattaaggtgtgtaaaagggactataggggaggggcaagagtgagaccacggaggaggatgttgcaatcgtccaggaatcatggtggtggaggtcactaaggttgtgcagcagacactgaaagaaaaagaaaatggctcctgacaaaggagggggaaatagcaggaacagataggaaaggcatttctgactggagaccttatacacactacaaaaccacaaacatacctttaaatactgggcacagtgtctcacacctccaatccctgcactttaggaggccagggaaggaggatcgcttgaagcaggagtttgataccagcctagactacaaagtgagatcccatttctacaaaaataaaaattagctgggctcagccgagtggggtggcacatgcctgtagtcccagctactcaggaggctgaggcgggaggctcgcttgagcctaggagttgggggctgcaatgagctatgattttgccactgcactccagcctgggcaacagagtgaggccctgtctcaaaaatacacacacacacgcacacacacacacacacacacttaaaaaacaaaaggttgaaaatgaaacacatagtgaaataaaagttctgatagtatcttcccaattgctccacctcactttagagtcaggtgagggaggatggtggcggaggctgcaacacagtggctgagacatcgctctcagcgtgtcaccgtgaggtctcccagggagggtgtggagaaaacagtgcccaggacagagcctgagaaacctcaccgggaagatggagcataacaaggaaagcattactcaaccattctgtgtcactgaagtgtgtacacaattagcccatctgttgctcaccctcctcattcaccaacccctattccaagaaatttaaatgcccaaaataggacttcccaccagtgggaggtgttggcagccaacacagaggagcagctccagaatccagggagtttgtttgaaataaaactgacctataacaaagagagacaagtatctcttcaatccctaccatccctccacctacccacccatccatccacccatccatgtatccacacttccatctaatgcacacaactatccaactgtccatccattcagccacccatgcaacaacccacctaatgcattaattctgtcattcttccaattatcaccacccacccatcacttcatacacccatccacccaccacccatccatccacatacccccatccatccatgcttccatccaatcatgcaccctacacctgtccccccacccatcacttcatacacccatccacccaccacccatccatccacatatccccatccatccacccaccacccatccatccacatacccccatccattcacccttccatccaatcatccaccctacacctatccatccacccaccacccatccatccacatacccccatccattcacccttccatccaatcatccaccctacacctatccatccacccatcattccatacatccatctacctacccatcaatctgtatacacatctatccattcacccttccatccaatcatccaccctatacctatccacccacccatcattccatacagccatccacccaccacccatcaatctgtatacacatctatccattcactcttccatacaatcatccaccttactattaatccatctactctactatccatacttccacccaccatccttccatccattaacctatctactcatccatctgtggtgagctgaatgatgaccccccacgtcttagtttccagaatctgtgagtgtcacctgatgtggcaaaagggattccccgcagtctaggttacagcaactcaactctgcctttatagcacaaaagtggtcctagacaaaacacaaatgatggatgtgtctatgttccagcacaactgtattgtacaaaagcaggcaggccatagtttggcaatcagccatcttgttctgaatgatcaggcccctacttcactttccgacaaatctctatccactttttcccttgctctctccaccgtagccacactggcttcctcgatggtcctcaggctgggcagtcatcagcctcatggcttttcaagacatacattcttctgtctggactgtttttcttcttgatattcccataattgttccctccctccattgagattcaaatatcaccacctccaagaaggcatccttgactcccaatctaaaacaccccacccctgctctttgaatctgacttattgttcctgataacactcgccaccacctgaaatcttacctatgttcccatgtatcacccctgctagaatactcatgtcccagcatgtgaatacatctgttgcgttctctgctgcacccaccacgcttggccagggtataccactaagtatgcgcccagtaaataccagctgaaagacaggatggatggatgcgtaaatgagggcatgaacagctgtctgtcctaagagtccccggctccttttttcacattatttcactctccgtgtctaaagcagtgtctggagggatgggggggctcgatgaatatgtctgactgaataaggacgtgaaatgctgctgcttagaagatatttgggatttctgtccacatccacagtggcccctgaagccatttttctacgttttgcggagacgctgctgctgctgacgcatttcgatgtgtgcaaaatacgcacatgaacagccgatacggacacttttgatgtccgtccctctgccctgttccctgctcactcggtgctcccaaccttctagcgaatggtgcaggagctcaggttgttgccatggaaaccccagctggaatgggggaggcaagtgcgtggggaaggtgtcgagagatccgcagaggatggaattttccagactctgcagtaagatgtgagctccacattgaaggcctggaccaatcgtctggcctcacccacatctctactgacctcaggactctctgtgtccgtagcccctttgggtctcctcatactctttggcagtctggagttccgggtctatttctcctgtgagtcctttagaaaggctgtctgctccttgcatctctctcttgctctctcgctctctctcttccctctctctttcctctctcctcttcttcttcttcttcttcctcctcctcctcctcctcctcctcctcctcctcctcctcctcctcctcctcctcttcttcttcttcttcttcttcttcttcttcttcttcttcttcttcttcttcttcttcttcttcttcttcttcttcttcttcttcttctcgatctcagctcactgcaaccttcacctcccaggttcaagcaattctcctgcctcggcctcccgagtagctgggattacaggcgcccaccaccatgcctagctaacttctttgtatttttagtagagatggggtttcaccatattggccaggctgctctcgaactcctgacctcaggtaatccacccaaagtgcaccctcgccctcccaaagtgctgggattacaggtgtgagccactgcgcctggccctcctttcttctttctctctctcttttcctcctctctctcctctctctctctttctgttctcttgcctctctctctctctttcctctcccctcttctttctctctctcttccctcctctctcctctctctctttctcttctcttctctctctctctctcttattcccctctctgctctcactctctctctcacacactccctcgggcaaaataacaaccctggatcactccagttcccactgccccagatcctcatttttgtttcagctcttattgtcagtccagggggtccatgctcaggtttgttaagtgggtatattacataactcttaggtttgaggtataaatggccatcagcactgtacccaataggtggcttttcacctcctgccccctccgtccctctcccctctagaagtccccggtgtttattggtcccatgtttatgtccgtgagtacccaatatttagctcccgctcataagagagaacatgttgtatttggtgttctcttcctgtgttacttcgctgaggacagtgggcagccttgtgcttttagccataatcagcaacttgattggaatgaatttccagctgggtcccttgtcataggagggctcgtggtaccttctgggaaacattcctgcatgcctgtctgttcccatgtctgccaaagttgagtccactccgtgatcttaaaaattatgtattatgtttagtttaataaacagtattatagcacttactctgtaccattcagtcactgaggctcatttgaggtatgttctaatattatctcaattttcgtatgaggaaatggaaggacaggaatggcagtaagttgtgcaccttcacccagctggtcagcagcagatctggggttcaatgtcaggcagcaatcccccatagtctgtgctttaaaaagaccagggctgtgcccttgcttgacacatctctgagggtggcccatgctctgatgtccgttttagagatgaggcagctgaggtaccagcctatgaccttagaaacgagttagtcattctctgactctatttcactcaactattttagtaataacattttcaacagagtcttcaaggagggttagctagttatttgtaaattgcatgctactgcagcaatgtgacacacacacgcgtgcgcataagaaatacatcatttttaaagacaaaatttaaaaaatagaaataattttctcacaatgtcccacttaggaccccattgggccaggcaagagggagtggtggcttaaaacagggtggtgacaatggagattggggaactagggatgatttgaaacatgtgggtgagagctaacctgtgcaaaatgtatcttgggattcttgacctgtgggtgatggactgggtttgctggcaattcgatcagctctgacttgcactgtctgtactggatgctgtcccacgggagcagtggatgggtggatatctgtttctggagctcatgagggagtctgggctggggatggagatttggggacccattgacacagggggtcattggagatcagatcacagtgttgtgcattgcacaactccagggggcaccatccaggggcaccatccacggggcacaactccaggtggcaccatccagggaataccatctgggggcaccatccaggggataccatccagggggcaccatccaggggataccatccaggaggtaccatccaggggacaccatccgggacaccatccagggggcaccatccagggaataccctccaggggataccatccagggggcaccatccaggggataccatccaagggataccatccagggggcaccatccagagggcaccatccaggggataccatccagggggtaccttccaggggataccatccagggggcaccatccagggggcaccatccttgcggatgacgctatgagtaggacctcaccaagattgccctgggagtgcacggggagaaagaggagcattcaggacttgattaactaatcagaaagacgagaattgatgatgaaaatatcactcaacctcccccaggtcttgggagcccaccccttgcatgagtgtgccctggatgtggaacacggagtcaaataagattattttggagctttaagatttagtgactgccctactgggttttggatttgcatggggcctgtggcccctttcttttggccaatgtctcccttttggaatgggaatatttacccaagacttgtacccccattgtatcttagaagtaactaacttgaaggctaataggtggaaggaacttgccttttctcagatgagacttgggactctggccttctgagtgaatgagttaagactttggggacttttgggaaggcatgattgtatcttgcagtgtaagaaggacatgagatttggggggccaggggaagaatgaaatggcttggatctgtgtccccaccaaatctcatgtcaaattgtcatccccagtattggaggtggggcctggcgggaggtgactggatcatgaggatggatttctcacggagggtttaacacaatccccttgggctgttctcacggaagtgagttctcacaagatctggtcgtttaaaagtgtgtagccctccccaccctctcattcctgctctggccatgtgatgtgcctgttcctgcttcaccttccaccatgattgtaagcgtcctgaggcctccccagaagctgagcagatgccagcaccatgttttctgcacggcctgcagaactgtgagccaattaaactttttttctttataaattacccagtctccagtatttcctctttttttttttttttttttttttttacggaatttcactcttgttgcccagcctggagtgcaatagtgtgatctcagctcaccacagcctccacctcccaggttcaagcgattctcctgcctcagcctcctgagtagctgagattacaggcatgtgccaccacgcccagctaattttgtatttttagtagagatggggtttctccatgttggtcaggctggtcttgagctcctgacctcaggtgatccacccgcgtcggcctcccaaagtgctgggattacaggcatgagccaccgtgcctggcctcaggtatttctttatagcaatttgagaatggactaatacacaacctcacaagtgttttcatacaaaaaggaggccatcttttgtaaaatgtccatcccagaaaataaccatcgattatccttgtagattcactgttacttccaaatatctgtgtgtgtatgtgtgtatgtgtatatgtgtgcgtatcccaaagtcatgatattcacatgggggtggtgtagacagaaaacagggactactagaattcaaaattaaccctaatccttggagaagaaaaaaggtgtctattctatttgtagtattcatccaaccaaccatgtaaacatttatttacacatccacacatctattcaccccacgttgatccatctgcccacccacccatccttccacatagtcacccatccatgaatccattcaaccacccatcaattgatccatccacccatctattcatccagcaaagaaagaaaatatatctccaagaaaaaaattgtgagctccgtaatgatacatttattcatgtatttattcactaaatgtaagctgaaagtcactttccagcccctctctgaattcgcctccacccattctcttccttgctcactcctcttcagacactgtggcctcctgtgctgttcaaacggacaaaaatcttcatctccaggtgtttccaggctctgttccctctgcccagaatggttacttccctggtaatccaaagtttcccgccctcccttcactcaggttgactcaaataccgccacctccaggaagacctccttgaccggctgctctgaaagatccctccttcactccacatctcacctgcttacgctttgtagaacttaccacgatctgttattttaagttaaacttattgactgataaacccccaaagataaaggattcataagaggagagttgtcttggcttcaaccctatccatcacatttaactcagtgctgacccatagtgggatgtcaggaaatatctgcagaatatacatacatacacttttttttctttttgtttttctttttgagacagagtatcaccctgccacccaggctggagtgccatggcatgatttaggctcactgcaacctccacctcccgggtacaagtgattctcctgcctcagcctctgagtagctgtaattacaggcgcccacaaccacgtgctgctaattttcgtatttttagtagagatggggtttcaccatgttggccaggctggtctcgaactccagacctcaggtgatccacccacctcggcctcccaaagtgctgggattacaggcgtgagccactgcgccccgcccacatatacttttgaatgaagaaaggaatgaatgaataatctacctgagcacagagattgggcatttatttatttatatttattctatggttttgtttcccagatgcagatggagcgtgtaaaacagaaagtggctccatgcaggctgctaggtctgctcacctatctcatgatctacacgcacacacagcgcatacggactgagtcagtgcacgctagaacataaactgcttctgttgctggtgctcagaatagattcatgattttactctgagtcagtgaaggctctcgcagccgctggtaaatttgtttttctccttcttcaaagatgggtagcaatgacgcacttcagcgcgcacaagatccgcagtcgcacggctgaggttgagacggcgccaggcaggccgcgtccccagtgatgcgaatccgaagccccccgaccgctgcccttcccacgcaggaccccgcgatctgcggggacagaggcggcgcaggctgctgccatggaaaccgaagctgggggagggagttgggggatgcagaagggcctgacagccccttagaggcccgaatgtccacccctctgcagtcaggttgtacccagtcaccaatcccagcctggcacacagtaggcctgcaacatagagtggaaagccacagtctgcgccccccatcaccccgggggagggggctccctccagcatcctggagcctggccttccttgaatccgttttccgaaggcgtttctatcccgggccccacgtcgcggggtggcgcaacgtgagccatgtatacaaagcacctcctgggctgctttgtggaaaacaggctgggcaggcagcattgctgagaacagaggctgaggcttctgcggacacccaggaaaaagccagagtgacttggatgccgttgaggatgaggaggatggacagagtgatatgaaaattgtggatggaaatagttatgccgaggcagaaaagagagacatcctggccacgcagcgccagcctgtcctgttttattatttgaattttatttgaacccagaagagcagaagctaatcactactcagccttgagtgccgcgtgctagtcctgccacacagatgatctccatgcatcctcacaactccccacggctgagtgcggcatggtagtcaccaccacagaacgaataaggaaactgagtctgaaagaggtgaaggcaactgccctaaatcagaggactggaaaacacggagctggatttaaccccaaatctgacaccttcagagcataaacgtggtgcacccacatcattcaagcttgaagttgagtcgggtaatccattcaaacagaaagacgcttaaaatattgtggtagcccttggaccacttctcttctctccttccctctcctcccttctgttcccttctcctcccctcctttgtctcttctttccccttctctcctcgtcctctcgtctccctcctcctctcctcatcctctcttctccgtccccttccctcccctctcagcccctcttctccctccccttcttcccctctcatctcttctccctccacctccctcccctctttatcccctcatctccctcctcttccctcccctcatcccccttctccctctgcttccctcctctctcatcccctcatctccctccccttccctcctctcatctcttccccctccacctccctcccctcctcgtcccctcttctccctctccttccctcccctcctcatcccccatctccctccccttctctccccctcatcccccatctccctccccttccctcccctcctcatcccctgttctccctctccttccctcccctcctcatcccccatctccctccccttccctcccctcctcatcccctgttctccctccccttctctcccctctcatccccccatctccccccttccctccctttcatcccctcttatccctccacttccctccctctcacctcctcttctccctccccttccctccctctgatcccctcttatccctccacttccctccctctcatcccctcttctccctccccttccctccgtctcatctcctcttctccttcctcttccctccctctcatcccctcttctccctccccttccctccatctcatctcctcttctacatccacactccttggtgctgttatccaatctcacaggtttaaatggagtccatacactgatgactctaaaatctgtacctgcagagtcctgacactcacctgaatccactgcctccccttcccagtcctgactcacctgaatcttctccctccccttcccagtcctgacactcacctgaatccaccacctccccttcccagtcctgacactcacctgaatcttctcactcacctgaatcttctccctccccttcccagtcctgacactcacctgaatcttctccctccccttcccagtcctgacgctcacctgaatcttctccctccccttcccagtcctgacactcacctgaatccaccacctccccttcccagccctgacactcacctgaatctgctgcctccccttcccgagcatctcatagctttcccaaactcaactaatattccctgagtttgtatatgcaccaagcactcttctaattgttttacagttgttaacatatttaattccttcaacagctgtaacgcccattttacagatgagaaatctacggcccaatttaccaaaggaactcactagaggaaacagtgagtgggagactccagtttacatggagctcctccatgatgcctggtctcagccttccgtgtgccacctccctcgttccagggtccttatgaggctccgttgtcctctgggcctttgcacatattgttcccctgccttgaacactgttccctgagcttgattccaggctcttcatcatcaacctgccccactgagggcaagttagtaaactcccagaaactctgtgtttcatcagtcattgatgttgggcatcttaggacatacctcataagggtattgtgaaaactaattacaacaatatgctggccgggcacagtggctcacacctgtaatcccagcattttgggaggccaaggtgagtggatccttttcttgttaaattgatagctagattgattgatagattgatgacagacggatggaagatggatgggtcgatgggtacatggcagaatagtcaggtggatgtgtggatgaatggactgggtgagtggaaggatgggttgatgggtggataaatggatgtgtttgtggatgaatagatggtcggatgtatacatggacatgtggttggatgaatgtttggttgagtggatgccacacataaacacttttcttttccaagggtgagttttgagttctagaagttccctttgttttctgtctacgttaaccacatgtgaatttcatgacattgggacacacacatccccactcagaaataaagtagcaggggatgaatgaggaaaatggaaagatggcctcctgtttccctgctaacacctgtggggttgaatgaggttttcatcatcaatttccatcttcctgattcatgagtcaagtctctcttcctacaccctcctgactatctcggtgagatttgcattcacgatgtcatacgcaaggatggtgcttctttgagttcatctggaccagagacatctgtacagtagctggtatgctcatctctgcctacacttttttatttcatgagacagggttttgctccatcaccctgggaagaggctggagtgcagtggcatgatctcggctcactgcagctttgacctcctggggtcaagcaattctcccacctcagcctccctagtagttgtgactacaggcatgcactaccatgcctgactaatttatatatatatataaaaaatacacatattatatatataatatacatatataaaatatacatattatatataatatacatatataaaatacacatattatatatataatatacatacacatattatatatatataatatacatatacatattatatatatatttgtttgtttgtttgttttgagagggcgtctcactctgtcacccaggctagagtgcagaggcgtgatctcggctcactgcagcttcaacctcctgggctcaaacgatcctcccacctcagcctcccgagtagctgggactacaggcatgcactaccatgcctgactaatttatatacatatacatatattatatatatatatatatatatatagagagagagagagagagagagagagagagacagagacagagacagagacagagtctcactctgtcacccactgggctagccctctttctaagcttcggtgtgcacgtgaatcccgtgaatatttattaagtgcacattcggattgagtaggtctgggatggagcctgcaattctgaatttcaggcaggttcttaggggctgccaaggctgctggtcttcagctcacaacgtgtgcagtgagttcatgctctggttgacctttaccaatgtttagttatacccagaaaacatttgtgagctaaatataaatatatacaatacttatagaaaatattaaatatatttagtaatacatttattacatattcaatttagtatataatattattattatatcaatattatacattataacatatatataattatatgaatttagtttatattgcataatataaataatatgtaacattatatatagcataatatatattatgtatcatcatatgtgttatataagatatatcatttgacatatgtattatatataatatattatataaaattatatataataatcatatgtgattctataataatttaatacatttaatatacaatatacaataatttaatatataatacatatttaatcctatatttatatatttagtaactatattatatatatttaataatataaaatagtatttatataattcatatgtatagtacatgttaataaatatgcatgtttataaatgaataataaatatacttgtttataaatcatacaaaccactgtaatgtataatataaaacaagcacaaaatgtaagaattttaaaagacatgacaacataacacatagaaactgaacttgtaatggtatcattcccacctcagacatcaccattgtaaacgggagatgtagcttagaactgagggaagaaacggaagtaaagagaacaggaaaatatagaaagttatctaatctgttgagggtctcctgaagatacatttctgagaccaacttgatttgctgatcaactagacgggtgacaaggatgaggttgatttttaacaccactgtacctgaagctccaggagattgggagccgccacccacgtgtgtaaatgcgccatgggccacacgtccagtccatgtcccttccattcttccttctaaacagcttgctgataaccctgcttttcccacatttccttcctaaattactgcagcaaccccgtccatttcttcagcccctcaaagtgaaatctaaaaagtcctcttcattccgtagctcttcttggggttcctgcagctcaggataaaactcgactcccctacaaggaccaaagcagtggacactctttagtttgaccctgggaggagcttggtcagggaaggccgacagccaatgggacttgtcttgaagctgctctttgcttcaaattcttaataagcagtctttgcaccacttatgagtgtgtgtttgtgtgtgtgtgtgtgtgtgtgtgtgtgtgtgtgtgttctggtcgctccataacaaacaccccaagcttaacaacatgcaacaacaattattttgttatgtttgcagattcataaagtgcaaggtgcagatggcttctttctagtccagtatgtctggggctagaattaggaaggaaggaagtcagttaggaatattcgatggctgggaaaagcccaacatttagaggggtgtaaagtgaggttagaaagtactaacagtgaaagctgtatcattgcctgtcttataaactatggcggtagttctcaagctgggatgctcttatcccccagtggacactggcaacgtctggacacagttttgattgtcactactggggaaaggaatgagttctgggcatctaatgggtggaggccagggatggccttcagtgcagaggacagtccccaccacacacacaacaaagaatcatccacccagctccaaacgtcatgctgtagtttggaattgccttcaacaagcatatctgaaaacaggtttgtatcgtggcaaggaaacgtgaaatgtgctcacataagagccagctgtgcgctgcacccctttacaagcatgtaggacaggaattcattatgtcagacaatgagaagaaaagacagccagccccaggaaattaaagaaaagctggctatcaacagcatctaggggcacaatctgcaaagcagacagctgcaatttgaatgtttggatggttcagaaatggacagttctgcactgctggccatgatgagctgtttccaagagctactcccttcctgagtttcctggagatgcatatatttcctggacctcagctgaaccctgggtttgtctcttggagggaacaatccgtggtgggtcagtgagctgagcttgagtcgcaactggactgtcttgactttctaactgcatcttgttggataccatggacttcatgttgtaacaataagtatctagtcaggcatgtgcaaggtgggagggggctctcccgaccccaccaagaatgtcaggtgaccatcaggtgatggccagggagttgtcacactgcctttctaaaataataactggtcacagccagtgctcggtaaaagcagtttcccaattgataaaaaacacctgaaactggtgattggcagcttcccactaagatatcaagagtcgggcgagtgggctggagcatgcccatgaagagacaaaatggtggagcttaactggtatttgaccttctaggggcattccaccgggaaggggaagagcgcctcaggtgagcgtgcacataactccagtaaacacgctgcatgtgtggcccctcccaagtgctagcaggccaccgagcatgcaggcagctcatgataagaggagaatcaagggaaatgggatgcaagatgctggaagtatgccagcatataaaaccctaagtccacggtcaaccagggcactggtccttcaagttgcccacttgggcctcttccaaaggtactttccttcctttcattttttctgggggggacccacaagtcattttatttaggagaccatctattctgcttttcttttggctactttttttctttatttctaaacaaaaacaaaaaacaggacacatgtgcacagcgtgcaggtttgtcacataggtatacatgtgccatggtggtttgctgcacctgttgacctgtcctctaaattccctcccctcatctctcaccccacaacaggtcctggtgtgtgttgttcccctctctgtgtccacatgttcttaatgttcaactcccacttacgagtgagaacatgcggtgtttggctttctgttcctgtgttagtttgctgaggttgatggcttccagcttcctttccttttattcttgcctttcattctaaagctttttaataaacttccactcctgctctaaaacttgcctcactctcttcttctgccttatgccccacagtcaaattctttcttctgaggaggcaagaattgaggttgctgggcacccataaggattcgcctctggtaacgtattttggtgctgggtcacttggataatttgcattgctaacaatatcagaatgttccctccaactgaatcttctttttcatgcaagactggacacatccattctgtgaggtgtgtttttagagaaaaaattaatccatgatacttgttaaagtggtaaggaacactttcttcaggaccatggagataggtataggggccacagcaatgggatttcacactggggcagagaaactgggcttaactctgaatacagcatgagcaagtgcgaatgtatagcccaagagcagggtaggtgtcagtggatgaaaaattattgagagaaaatcaaggtggtagcctggctgtgttcactgttccatgctcagtgttcaagagatgtacttttctgaatggtgaaaaatggtatctgagtccattaagattgtcagggaattcaggctaagtagcctctcagaatccttgctgaagacaagccaggttggtcagatgttatgtaggggttcacagagggtgaggaacccaatcaggcatcgaggaaagcacaaacctgaggaaatagacacttctgggaactttacaatggcaggagtacctgcaaattggattttctgcagagacacatttgccaggttacaacaaagtcacctgaacagatatacactgctttttaaatatataattcaattttgtgaaggtagggcctcactccatcactcaggctggggtgcagtggcacactcacggctcactgcagcctcaacctcccaggctcaagcagtcctcctgcctcagcctcccaagtagctgggaccacaggcacatgccaccacactcagctaatttttgtttttgtttttgtcgtttttgtagagatagcgtttcaccatgttgtccaggctggtctcaaacccctggctcaagtgatcctcccaccttagcctcccaaattgctgggattataggcatgagtcatagggcttgaccttataattatatatttttagagctgttttaggttcacatcaaaattaagcagaaggtacagagtccccatagctctgtaccacacatgcacagcctcctctatggtcagcatcccctctggagatgtaaatacagactggatgccccaggtgcattggttacagtcgacccacctgcactgacccatcgcccagactccatagttcacatgagggctcttggttttgtacattctgtgggttcagacagatgcatactgacaagcatctaccattgtcgtatcatacaggactgtttcactgccctgaaattcctctgtgctttgcctattcatccatctctcccccgcttacctctggcaaccacagatctttttactgtctccatagttttgccttttccagaatgtcatgtagtgggaatcatactaaactaaacacactctcatgatccagcagtcatgctctttggtatttatccaagggagctgaacacttatttccaaacaaaaaccttcacactgaggactatagcaattttattcataattgcaaagacttggaagcagccaagatgtccttcagtcggtgaatggataaacaaactggtccctccaaatgacagaatattattcaggactaaaaagaaatgagccatcaagccttgaaaagacatggaagagatttaaatccatattgctgagtgaaaaaagctaatcagaaaagtctttatttttttaatggcagcttgatgtcccattggacaggtacaccactacttattttaaaatcccatttggggatgacttttaaaataagactttgagacaattaatggataactaatctctagctatgaaaggtctactgcactgaagaactttattggtgaatgtaagagttcaagaaacaggaaagaaacacacaaagatgctcaacagtcaaagacatgtttattttggagaataaacctgagaggggcttctgacccatttcagtcaggtgcattctctctcttacagattaaaagtatttatgggttcagagcgagagaacctgtcataggcttggaacatttgtgtgtggcggagaagtttattgcggggttggaatgcctctggttggaggtgaggttatctcgtggctgacatctctccagtcagaggggaggttatcttggggctggcatgtctctggtcggggagaggtttatcttatagttggaatgtttctggtcggagatgtcatttgtggtttatggtcatgctgaccttcaccattaggctgatgccctttggatttaggagatttttgatcaaggtgaacttttaaatggtggtgcttgtccaagatggcgatactcctgctctgtcagtgaatattttaaacgtgtgcataatctctcagatagatcaagctggggcaccaagaaagatcaccataggcctctataggatggattttttaatgttcctttcatttagaaacatgtgctcggcttcccctaaaccctctctcaggatattttacttttgttgatgactcaccccactcaccacatctacttagggccatgatattggagagtcagattctataccgtacatttttttaaatggctgtttatccgtggaacacactggaaacacctgcccatgccttgacgtggacttctagcctctacaccaagataataaatttctgttgtttcagccactcagtgtgtggtaatttattttaaggcagccctagcttaaataaagtactcataactcattcataacaccccatttttttcacatttctgccaagactctaattaagaataaataaagctgtgcaaaataagagcgtaacaaaacaatggtttcatcctcattcctagactcccctcccccagcctagcttctcagtctgcctctggggctcccacctgttgtgagacgcaggggagatgtgatgaggggatcccctggtgctgccatggaaaccacaccaggagtaagggagaggcgtggctgggaacaagggagggaaggcctcagagagagctctggaaagtgtctgggtaaggttgccccaaattccatcctagcacacagtatatgctcaataaatatttatggagcaaattaatgaaattaatgaaattctgcaactttttttttttttgaggtggagtcttgctctgtccccaggctggggcacagtggcatgatctgggctcactgcaacttcctcctcccgggttcaagtgattctcctgcctcaaacacctgaggagctgggactacaggtgcccgccaccacacccggctaatttctgtatttttagtagagacgaggtttcaacatgttggccaggctggtctcgaactcctgacctcaagtgatctgcctgcctcggcctcccaaagtgttgggattacaggcgtgagccactgcgtccagcctgaaattttgcaacatttgtctaaagacttcgaacatggatgattgtggttcctaggtcatgggtttacataagattctacttataaaagtacattaaggtggttaaaaatttgttttaaaacctttattaaaatttcttgtcaaataattgttttgtttaataagtgttcaaagttgtgaaaaagcgtgctaacattgttaacagcacagactctggcccctgcaaacagagcctttctcaagcagcttcccccagctcccctctctggctctctttccctttgtctcctcatcttgtttctgtcaccgtcatccgtgtttgaacttacttggcttatttattcattttgtttgttcactggtttttttgttgttctctgggtgaactggtaaactcctgagcactgagaccttgtctgtgtgttcacctcgtgtttccgggacctgaacagtattgggtcattaccgatgctcaacgtacatgttttgaataaatataggatgtgtcaaaggttatttcaaagatgtatatttcctttcactcaacagtatcacttctagaatataccctgcaggtatgcccaaataaatgccaaatatgatatgcatggcgttattttctgtagcttttctagaccagaagaaaagaatggaaatgacttcattgtgcatagaagggtagctggctaaataaaccttagtatcctcacactttggaagattctacacaataaaagagaatgaagttcttaccgtatagatagagaacaatgcccaggatgaattgtcacatggagaaagacaagtgccaaatggtatacaccatcactttgcagaatgtgcatgagagtgtaattatgctcagtagtttatgaataacccattatgcataataacatgggcataatagattgtgcatgataatatttgcataatatattagaacatttttgcatgcatacgtatgtatgtaaaacttcactctggggcaaaacacaagtaattggcattagaaaaattgccactggaggccgggcgcggtggctcacgcctgtaatcccagcactttgggaagccaaggcgggtggatcacaaggtcaggagttcgagaccagcctgaccaacatagtgaaaccccatctctactaaaatacaaaaattagctgggcgtggtggtgcacacctgtagtcccagatactcaggaggctgaggcaggggaattgcttgaacctgagaggtagaggttgcagtgagcctagatcacgccactgcactccagcctgggagacagagcgagataccatctcaaaaaagaaaagaaaagaaaagaaaaattgcgactggaagggagaagtgaaagaacaaagctcagaggtggaagagagaattctttttgttctgcttagcaatttgtactttctttgaaatgaatacatagatttgcaagagtaactaaaaacaactatttatatgatattaagagttctattagtgtgccattttataaatgtcaccataatcattatcgaatgggctagaggttaacatttataagatatgtgcattaaggtgttccaaaatattataacagggactggaaagaaaaaaacattaataaatataagattatttacaagtttaattcatggaaaaaataagcaaacgttggaaagcaaccagtaaacaattggaaatgaaattttaaaaataccaatcacatttatatctaaaaatatgcactatctattgcaaatctaacaaaatatacagaagatgtgtactttaataaagcacacatcattgctaagagaagttaaataagacttaagtaaatagagacacatgtgatgttcatggattaggagacctgacaatgttaggatggccatgaccccagggtattgtaatcccagtcaaattcccagtgccatattttgtagaaattgacccattgattctagagtctatgtggaatgacaaaagatctacaactggccccccaaaaattaggaaaaccaaaagaaagaacaaaattggaggactttatctgatgtcaagattgtataaagctacaataatcaaggcagtgaggtatcagcacatagagaaacatacatcaatagaacagagtccagacacacatccacggtcaattgattcttgacaaagaccatggaacttgacaggaaatggaaagtcttttcaactaagcattctggaacacatatataacttaatttaagatgggattatagacctaaacattgaaaccttccagaaggaactatagaaaaatatcttcatgatgttggaataggcaaatattaggagacaaaaaaagctcaccattaaacagtcagtaaattgaattacattaaaaaaaatttctgttcatcaaaatattctgttaagacatgaatatgcaagccacatggtgggggattatatttacaatacatatgtctgcaaaaggacttataatcagaatatgaaaaaaatgcctacgtcaataataaagggacaattcaattaaaaatgagcaagaaactcgaattggaactttacaaaagaaaatataggccaggcgtggtagctcacacctataatcccagcactttgggaggccaaggcaggcagatcagctgaggtcaggagttcgagaccaccctggccaacatagaaaaaccccatctctactaaaaacacaaaaattagctgggcatggtggcaggtgcctgtactcccagctactcgggaggctgacgcaggagaattgcttgaactcgagaggcagaagttgtagattgtagtgagccgagatcatgccattgcaccccagcctgggcgacagagcaagactccgtctcaaaaaaaaaaaagaaagaaagaaagaaaatatgcaaatggacaataaacacatgcaaagatgtataagctaattagctgacagagaaacgcaaattaaacccaaaataagataacatttcacaattactaggatggttaaaatacaaaagactgaaatactgaatattggtgagaatgtggagcaactggaattctcacacatcacagatgagggtatataatggcgaaatcattgcagacaaacagtctgagtatttctgagaatatcaactgtataaataacctttgactggctcatttcactcctaggtatttgcctcaaagaagtgaaaacctatgtccataaaaagaattataggccaggcgaagtgactcgcacctgtaatcccagtactttggaaggccaaggtgggaggaatgcttgagcccaggagtttaagaccagcctgggcaacatagcaagaccccatctctacaaaaaatacataaattagtcaggtgtggtggtgcacgcctgtagtcccagctactcaggagactgaggtgggacaatcacttagcttgaggaggttgaggctgcagtgagctgtgatcgcactactgcactccagcctgggtgacagagtgagaccctgtctcaaaaaaaaagaaagaaagtttaggtctgggcatagctgtgcagagagatgctagcctaaggcacccaggcctccttttacctggtaaatgcagggaccccataatctgtgcgtttgaaaacctctgcgtgggtcatctcaggactccctgaatgtgtctgtatccctacgtgttgctctcagtcaatccctaaaccttctctgaggatgtttgaagcccccaacctcccttttcaaacaatacaattagctcagggctatgatatttcaggtacaggaagtggcctatgtcatcctaattctgcactggtatgaggaataaatacggtcgttaatccctggaatatcctgaggaaaacgtattcagtttattgagaagaaaatctaatatatgataaagcagctgtttgaaaccgtatgtgattttctcatcaatctctttcctgggttactgagtgggcacgcatgttctttttttcccagtaattgctattttactgtgacattccggtttaagactttgacatttaaatgataaatgtcgtgtctcgaatctcagcacaaaaacacttttctacggaattgctaatagcagtcttcatttgccaattcccaacctgagctgatcctcacacggctacactgttcatgtaatttgagaaatgactcactatccctgagtcgtgattctctgcaaggcacgactctctaaaggtgccacgagacagagactccctccccgtttccaacaaggcgtcttccacaagggaaataaatgttcacctttcttgtctttcaaatgtcaaagaattgttttttcttacggcaaggaactgtccacaggttaaaatttgttatccattttcttattgtgaagtttaaaatacgggtaaaaaatgtgcatgaagttcattggaacaggtgaatacatgacagtaacaacttcctgcgttaggaaagactagggttcccagaacccccaccccttcccatctacaacccccttcctccctctgctgcccccgtccaccccgccagccccctggacataaccactattctgacttttcttttgtttttctttttttcttgacttggagtctcactctgtcactgaggctggagtgcagtggcacaatctcagctccgcctcccaggttcacaccattctcctgcctcagcctcccgagtagctgggatcacaggcacccaccaccacacctggctaattttttgtatttttagtagagatgagatttcactgtgttggccaggctggtctcaaactcctgacctcaggtgatccgcctgcctcgtcctcccaaagtgctgggattacaggtgtgagccaccatgcctggcctattctgacttttctaataatttattttcgggtctttatcccttcactgcctggctaaaccactgtttatttttatttgtaaaatagtaatctttgtatttgttaaaatgttagtaatgctcgctctattttgttttgtttttcactcccccacatctccgtcttccccacattgatagctggttctgtttggttttaaatccccatctactgtggggatttaaggttttttccttaacaattttaattgcggtaaaatacatgtatcataaaacgtaccatttgagggccaggtgttgtggctcacgcctgtaatcctagcactttgggaggccaaggcgggtggatcacctgaggtcaggagttcgagaacagcctggcaaacatgactactaaaccccgtctctactaaaaatacaaaaattagccaggcatgttggtgcgtgcctgtaatcccagctagtcaggaggctgaggcaagagaatcgcttgaaccccgggtgaggcagaggttgcagtgagctgagatcacgccattgcacttcagcctgggcaacaagagcgaaactccgtctcaaaaaaaaaaaaacaaaacaaaaaacaaaaataactgtagcatttgagccatgttaaaatgcagagttgagtagtattagtctattcccattgttgtgcagccatcaccactgtccatttccagaactttccatcatccaaaactgaaactctgtagcccttaaacaactcctcccagcccctggcagcctccattctactgtttgtatgtatgaatttgatgactcaagacacctcgtctaagtggaaccaggcagtatttgtccttctgtgcctggcttatttcactgagcatcatgtccccaaggttcacccaagctgcagcgtgtgtcagagtttccttccttttgaaggctgagtaatattcccccgaatagatggaccacactttgttacccactcccctgtcaatggacctttgggttgcttccgcgtcttccttctgtgaacacgtgactgcccacagcttcattcctaggccatgcaggagtgaacggccgatacagagatattaatcaatatcttcataatgagggcaggaataaaggagaagataagtgaatgatgagaggatgtctcagacacctgcacagctgactagaaaactaagatttctggccaggcatggtggctcacgcttgtaatactagcactttgggagaccaaggagggaggatcacttgagcccaggagtttgaaaccagcttgggcaacacagcaagaccctatctctacaaaaaataaaaaattagccagatgtggtggcacatgcctgtagtcccagctactcaggaggctgaggcaggagggtcacttgagcctggggaggttgaggttgcagtgagccatgatcgtgcccctgcactccagcctgggcgacagagtgagaccctgtctcaaaaaggaaaacgaaaagaaagaaagaaaaagaaatcgatttctgagcctgtagaggctgagcacaatctggtttttcccttccataaagtccttatccacggacgtgatttaacacacataaatcacagtcaccggcagtggataaaaacctcggcctcaagtcctcgtctctgcctttctatccctccagctgggccaatttctggtccattatttcagggctcaatcccagcccctccccagctctcatggccatgggaaattgaggtaagctcagactgctgtcatggaaaccagagtaattgggagaaaaggcagagcgctgaagaatgctgtacaacgttattagtattcgtatatgccagatcttatacaaatatatgaaaatgctatcatttgttgtaaaaaaaattatagttagaaataaatgcacataaagatgctcacacaaacaacaactctggaaggacacacaagaaaattattaattgaggccgcgcgtggtggctcacacctgtaatcccagcattttgggaggttgaagagggtgggtcacctaaggtcaggagttggagaccagcctgaccaacacggtgaaacctggtctctgctaaaaatacaaaattagctgggcgtgatggtgcatgtctgttatcccagctacttgggaggctgaggcaggagaatcgcatgaacccaggaggcagaggttgcaatgagctgagattgcaccattgtactccagcctgggtgatagagcaaggttctgtctcaaaaaaaaaaaaaaaaaaaagtgactacaaggtttgaactaactcaagttagaggcctactttaaaccttcagccaaaaatccgttaaaaatacacaagcagttagtatttataagagcttctactagaaaattcttccaaaagatcttcgcagaggcagaaaacaaataacaattgagagacagggttgtaagggggtgctatggtctgaatgtaagtacctcctcccaccgaattcctctattgcaaccctaacccacaaggtggaggtattaggaggtgggggccccaaggaggtgatcagggcatgagcgccttcgccccccgaccattcgaagatacagtgagaagaggccacctgtgcacctggaaacgggccttcagcagacactgcccctgctggtgccttaaacttgaacttctggcctccagaaccatgagaaatcaatgtctgttgtttataagccactcggtctatggtattttgttgtagcagcctgactgggctaaaacacagggtttaaatactagggcaatgaccgataaacaacaatcacgttcataacaccctgaaaatgaacacttgcaaataacgtgagaaggaacgaattttgctttatcacacgatgaactataacatttcacaagtcaacaaaaacgagaaaagtgcacacagagatgaacgggcgaggcttctcacgaggaatgcagacaggaaaaccttctgtgcttttcccagtaatctgagaaattcatgggaaacgcacacatgaaatccaattttctcctaatggatggacagacagcagaaaggatggagcaattaggcattgccatggaaacctgattgagaaggagaaggggaggagctgagaagaggggccgagagcacccctcaccctcaggctctgcagccagacagtgaagggccagccaggctgcagggtatatgcaggtgtatttgtgggtggataattaaaatgagggacaggccgggtgaggtggctcacacctgtaatccccgcactttgggaggccgaggtgggaggattgcttgaggctgggagtttgagagcagcctgggcaacacagggagatctgtgtctccaaaaataattagccaggtgtggtggtgtgcacctgtggtcccagctactcaggaggctgaggcgagaggattgcttgagcccgggagattgaggctgcagtgagccataactgcacaaatgcactccagcctgggcaacagagtgagaccttgtcaaaaaaaaaaaaaagagcagaggtggcttctcaatttgggagaacaatctcttctacctcgttgggtcactgcgagaactggatgatgtttgtaaagcatgtggcccgtttctggcgtgcatgtgctgggatttccacagggacaggtagaggtgcagctaggagaatccccaggatgtgggggaagctgggcagagcacagatccctggggtttaccccagttgaatgaagatctcttgattggaaaactgcacttcctctcacaatatgacagaggtccgtgttagcctgctatatttatttgtgtgtatttgtgtcctttttttttttactatttattatttgctgaaatattctttttatttattattattattattattattattattattattattttgagacagagtctaactcttgtcacccaggctggagtgcagtggtacaatcttggctcactgcaacctccgcctcctgggttcaagcgattctcctgcctcagcctctagagtagctgggattacaggtgcccaccaccacgcccagctaattttgtattttagtagagatggggtttcatcgtgttggccaggctagtctggaactcctgacctcaggtgatccaccccccttggcctcccaaagtgctgggattacaggcatgagccaccacacgtggcctattctttttaaaaacaattttttgttctcctggtaactgtggttctccattcatcccagtgtgttccctgaaagcagagatccttctccaaattcatgttgaagtcctaaaccccagtacctcagaatgagattgtattttgagatgggcctttacagaggtaattaaggttaaatgatattatcagggtaggccctaatccaatatggctggtgtccttatagaagaggagattaggacacagacacacacagggggatgaccacgtgaggagaggagggaagacggccaaatacgagccaagcagagacaccttagcagaaaccaaccctgcccacaccttgatgttgacctgcagcctccagaactgtgaaaattttctgttacatgagccacccagtctgtggtactttattatggctgccagagcagactaagacagtcacccatttaaggggaaaaaaaaggaagttcaggttgaagaaacaggaaacattctgaaaacatgcatataatcaacaagaaaacaaagaattatttagcatattagaaatggaaaaaaagtccgggcgcgatggctcatgcaggtaatcccagcacttcgggaggctgaggcaggcagatcacctgaggtcaggagttcgagaccagcctggccaatatggtgcatccccgtctagaatatgaagcaggcagaagaacgtgaaaaactagactggcttagcctcccagcccacatctttctcccatgctggatgctccctgccattaaacatcagactccaagttcttcagttttgggactcggactggctctccttgctcctcagcttgcagatggcctattgtgggaccttgtgatcatgtgagttaatatttaataaactccctaatatatcctatcagttctgtccctctagagaacactgactaatacacccagacttgcagaatcaccctcaccttcaacaccagcattctggcctgggggctggacatgcaggctggcctgttcctttgcaatcatcccagcatcacagaggccactgtggctgcatggacctatcactcctgacctgttgttactccctctcctcatcttccctgtcctgccccttgagacggctccacttcctgaactccccaaatccaacttccacattccatcttcattgctaacaccctggaccagggcactgagatctctaccctacaagaccacggcaccctcctcatggggctccccacctccacaccaggccctgggtcctccaccttcccaacaggagccagagggagagctttaagtcataaaacagatgatgttgcctctccttgccattcggacttacaactttccagtggcctccaatgaacctacaatgaaatccaaaatccccagcataagagtatgtaggagaaggaatttgaaaacatctagaaaaatcgcatgcacatgttccctctggcccagaggtgattggtcaatacttatctaaactgcaaacacacataaccttgaattaaatactgcaattaaattctcagagttcatccagaagtcagagcaagattcgccaacataacatctgtgtaataagactgttcagtgtaccagactattattattattgtaacagaaactcatcaggaaacgtgtccatgaaattgtcagaaatctgcaaatgcaatgttctatggacataaataaggatgtgtaatgtctttgtgtattgatgatataaggtcgtcaccaagatgtggcgttaagtgataaaagcgaagtagcacacgatgcaatcctgggtttcttgctgtgtttttaaaagaggagaagggagtaaggctaagggtatatgctggtgctgatatatgtacataacagctctgcaaggaaacagaactggaaattggatttgtcgctagacttttgtgcagacttttcttctaaagaacctagtactcaactcagccattgtgagggcaaaagcagtcacagacaattcataatgaatgtgcttgactgtgcccaataaaactttatttacaaagatctgtagagccagatgtggcctgtggaaaggatagttttctgatccctggtccagagaatgaaaactcgggatggggaggatagatgaggatcaaaatggaaaaagaaatgtatcatcccaaaatcaatgtacaaaaatgagtagcatttctatgcaccagtaacattctagatgagagctaaatcaagaacacaatcccatttaccatggccacaccaaaaaaaaaaaatacctataagtatttctaaccaaggaggtgaaagacctctacaaaaacctctacaaaaaaaacaaaacagtgctgaaagaaatcagtgataacacaagtaaatggaaaaccattccatgcccatggttaggaagaatcaatattttttaagtggccatacttctcaaaacaattttacagattcaacgctgttcccaccaaactatcaacatcatttttcgcataattagaaaaaactattttaaaattcatatggaaccaaaaaagagcctgaatagccaaaacgatctgaagcaaaaagaacatagctggaggcatcgcattacccaactttaaactatactacaagattagagtaaccaaaacaccatggtactggtacaaaaatagacacatagaccacaggacagaatagagagcatggaaataaatctacacacctacagccatctgctcttcgacaaagtcgacagaaatgagcaatgagaaaaggacttcttattcagtaaatggtgctgggataactggctagccatatacagaagattgaaacaagacacctacctatcaccatatacaaaaactaactccagatggattcaaggcttaaatgtaaaatctcaaaccataaaaaatcctaaaaggaaataccattcttgatattggcctcagcgaagaatttacagctaagtcctcaaaagcaattgcaacaaaaaaacaaactgacaagtggacctaattaaactgaaaagcttctgcacaacaagagaaactatcaaggcagtaaacagacaacctacagaatgggagaaaacattaaataactgcgcatctgacaaaggtctagtacccagaatctttaaggaatttaagcaaatcaacaagcaaaaccaaaataatcccattaaaaagtgggtaaaggacatgaatacacacttgtcaatagaggacattcaagtggccaacaaacaaaagaaaaaatagcatcactaatcatcagagaaatgtaaatcaaaaccacaatgggataccatctcacaccagtcagaatagctgtttttaaaaagttaaaaaataacagatgctggtgaggttgtggagaaaaggggacagttatacactgctgggagtataaattagtccagtcactggagatttatcaaagtactaagagttgaactaccatttgaccaagcaatcccaatattggatataaatccaaaagaaaataaattattctaccaaaaagacacatgcacccaaatgttcatcgcagcactattcacaatagcaaaaaaggactcactattcacgatagcaaaaatggtgcctatcaatagtggattgtggtggccaggcgcagtggctcacacctataatcccagcactttgggaggctcaggcgggtggatcacaaggtcaggagttcgagaccagcctggccaacatagtgaaaccctgtctctactaaaaatacaaaaattagctgggcatggtggtgtgcacctgtagtccaagctactcaggagtctgaggcaggagaatcaggtgaacctgggagacggaggttatgctgagctgagattgtgccactgcactccagcctgggcaacagagtaagactccatctcaaaaaaaaaaaaaagaacatgtggtacatatacaccatggaatactatacagccatgaaaaagaatgaaattttgtcctttgcagcaacatggttgcagctggaggccttgagctgctggcccatcacacaagcccaacctggcctacctggtgcccattgatccaacctgaatcctcttgagagcttttacctgttgtgatgagggaggaagtctcaggattggccatggaagctgcagctgaagcaagggaggagaagggccggcagaatagtccccaaagtatatcgttaagtaaaaagcaggccccaaagaggatatatgagatgctctcattggttgtttaaaataagaggggaagattatggtttggatatagatgactgaatagatacatagatagatagatgatcaatagatggatatatatatatatggcagataggtagataacacagatgaaagattgatagatggatagatatatatgtaatagataagatagatgattgatagatacttgataaatagctagatagatgacagatagatggatagataagatatatagatgggtgactgatggatgaatagatatacacacaatagatagatgatatgtactgatagacaatagattaattatagaaagaaagaaagaaaaaagagatagggagagagaaggaaggaagagaggaacgaaaaaaggaagggaaggaggaaggaagagagggaggcagaaaagagaaggaaaatgtgtgaaatgacaaaagggagaagtaagaggatgagggatcaaggctgagagaaaggttcttctctgtatcacctttggaactgtttgagcatgtattacttctccaaaaaacaaattaagatatgaagtccacaatcaggattgaacaaaaaatgctagccacgtaaataccgtcctatcagaatctgccctcacactttccaccataaccaatttcaagtggattggaaatgaacaccaatgtgacctctgtacccaggctttccaaaatataacagcagacttagatcacacggaggacatgatgacacaagtagcagcaagcagcttttgaaatcttcctgatatcacacctctgttaagtaatttgcaaatattatattgatcagtctcaaaaaagggagttgtgtttgcaataacagcagcgttaactgaccacttactatgtgccaggcactctcgtgacttatatttttctataaatctatattttaatttatatataattaaatactttacatataattatattttttaaatttatataaaattctttgaatcctcacacaacacctgtgtgagaggaactgtttttatcttcaacacacagatttggaaactgatattaagggaattgcataagtcaccagctgagaggtggaaaagccaagatgcacactcaggctgtgtgactacctcctctccttccccctcctcaccctgtccatcaccacttcccgttcgttccacttccagaacactccaaatccatttatctcaatggccaaaactgacaccagaccctgtctctctccctccaatgaccccaaagcaaccgcttcaaggatctctctaattccatgctagccactttgctattttcttcatgttacttcccacatgtgagcaatgggataaaaataactactattgagtgtgtgtgtgtgtgtgtgtgtgcgtgttttcaatgaatgaagcagtaaaccaaaaacaagattctaagcccccaaccatctgaatggactcctcccatccacagggcattctaaagttaacctgaaaaaagtcgtttaggccatgatagtaaagaggaaccaaacatgcctcattctaccctcctctcttttgaaattactcatagaacaagcttcttaagtctgataacaaaactttgcaatctattttctgaagcctgctacctggaggcttcatctgcatgataaaactttagtctccataacccattattataacccagacattcctttctattgataataactccttcaaccaattgccaatcagaaaacctttaaatctacttatgacctggcagcacccacctcgagctctcccacctctttggattaaaccaatgtataccttgtattgattgatgtctcacatctccttaacatgtataaaaccaagctgtacctcaaccaccttgggcacacgtcgtcagtacttcctgaggctgtcatgggtgcgtccttaaccttggcaaaataaacttcctaaattgattgagacctgtctcagatactctttcattcacaaatctgtacatattgtcatgggagcatctggcagtagtcagtgctttatggtcattggttattaagttcaatcatgtctcacataacgactgcatatatgacggtggtcccataagattatcataccacagatttaccatacattttctatgtttaggtacactgatacttaccattgtgttacagttgcttacagtattcactacagtagcttgctgtccaggtttatactctcagaccagccctgtaccttgtagcccaggtatgtagcaggctctggcatccaggctggcgtaagtgcactccaggatgttccacaataaagaactcacctaacgaggcatttctcagaatacatttctgtctttagtgatgcatgacagtacatgcaccataataaagaaatattaataggctgggtgcagtggctcgcgcctgtcatcccagcactttgggaggccgaggtgggcagactacgtgaggtcgggagttcaagaccagcctgaccaacatggagaaaccccgtctctactaaaaatacaaaattagccaggcgtggtggcacgtacctgtaatcccagctactcaggaggctgaggcaggagaattgcttgaacctgggagatggaggttgagatgatcatgccattgcactccagcctgggcgacaagagagagactctgtctcaaaaagaaaagaaaagaaaagaaaagaaaagaaaagaaaagaaatattaatataagccatgaccaattcacactgtttatatagtaacataaatatcagtacatattcagtgctcaagccgccatcatctctcccctggatggcagcagctgcagcctctcactgactctctgactccacgccagcctctctctcatccctcctccactcaggagccagaaggagaattgacaacactcacagaccacatcacctccacaatcaagactcagtgtcttctcagaagagcactattcacatttcttatcttggttctggaaggtcctgcctttctccccttgccttcctctcccaccccattcctgccactggccctgaactcaccctacccagcccacctcagcctattccatttccttctcacctctgggcatcggcacctgctggctccccaaacatctctatggcaggctccttctaaccagtcggacctcagccctggtgtcactgaccacagatggtgttcccagaccctcctgactgacctctgacacacatctgtgctacctcctgtagagagtccattctttttggagatcagttctcgtgtctgttaagtcgtgtatttgttgtccaccttctccacataaattgtagcttcttgaggtccaatgtctcatctttcttatctggggcacataggtggtactaaatacattactgttcatctggtattgttttatgtaactttctggttaatgactgctttacccattcattctaaccatcagcaaggaaggagttgttcacatttatgatctcagtggctacaatagctactggatggatgaatgcatgacagatggatgaatgcatgacagatggatgaatcatggaaggatggttgattggaaggatgtctgggtgggctgatgactagttagataaatgcacaaatggatggtttgttgaactgatggttgcgtggatgtatgtatgttatggattgatgggtgatcaatgggtagacgaatgaatggatggctggttgaattgatggttgcgtggaggtatgtatgttatggatggatgggtgctcaatggatagatgaatgaatggatggtttgctgaactgatggttgtgtggatgtatgtgtgttatggatggatgggtgatcaatggatagatgaatgaatggatggctggttgaattgatggttgcgtggaagtatgtatgttatggatggatgggtgatcaatggatagatgaatgaatggatggtttgctgaattgatggttgtgtggatgtatgtgtgttatggatggatgagtgatcaatggatagatgaatgaatgatggctggttgaattgatggttgtgtggatggatgatatatcaatgaatggatggctcgttggatatatggacaggtgcatgggtattagatggatgcataaattgctgggtggatggatttgtggatggatcaaaacgatgggtggataaatggatgtatgaatagatggataggttcctaatgagaaatgacaatgtctgtgttactcacactaacagaatggaatgtgaattgaaacctgatgatttccttgagagtcagaagaggatttcaaacaccctacccaagacatttagcactgacaaaatccatgtggtgacctctgctggggtccccagattgcccctccacagctgcgctgctcttgcttccctccaccaccctattctgcccaaggaggctcccacctgccatagggatgggcccccagatccactgttgccttggaggtgaggcaggaaagagctgaggaaggggcagagagagccgggagactggaatgttcctgactctgcagtcagtgtgtggcttcagtgtgaaggcccaggcacacagaggccagagaacagaaatattttgggaacaaatacgtgaatagaagtgactgactccacctcactgagcctatgcttaaccttctgaaatggggaaagcaatcatgtctagctcattgagtcatttgagaattaaatcagagggtgcttataaggagctcagcccctcctgacaggagacaggtgtcactctaattgagccttagagatccctgcaccaggatcccctggtgtggagggatggctgctataaatgcaggtgcccaggcccatgccagacctgctgaaggaaagtgcttgcctaagaaaacctaccctccctgccacttgctgctttgttcactctctatatatattttattttcaaatatcatgcagagtttgttttctaaaaaaacattaaatgtcacagctcatttaccaatatgctataaaatgcagttataaccatgcagaggcaagagttgcagaaaaaaaatgcaattgtaaatcattaacatgaaacaataatagaatgaataaaaatgtaaattttgtaatatttcctttcatccctcacaggttcacaaaatattcagtttcagcaacttttaaaaaattaataggctttatttttaaagcaattttaagtttatggaaaaattaagcacaaactacagagagttctcatacggcccacaccaacccaacttccctattatcagcgtcgtgttttggggtggtacatttcttataatcgactaaccaacattgagacgttagtattgactcaagtccacctttctcagtatttttcttccacttatcagaatctgagctctctgtatttgtttctttcgaattagtctcactgtactgcaacaaaggtccctaaagcagtggcctatccatctcgtctacctgcatccccatcccctgggaggagcagggcacacaaggaaacatgaataggtgcccagaggtgcaaagggtcgtttagaaaaagcgcagattcatggaggtgtgaatgaccaagaaatacagatgatggccacaagccaagagaccaaggaagattgcgacccttgtccagaaaatgaggtgtcaggtgtgggagaaagggctggcctcccaaacacaggtggtaggagacttgcttgcctgaaccagaacaggcatagggaccagaatgaccagcggattaattagagaaatgtctttgagccatactatgttcctcgtcctagactaaattacttttagtcctagactaaattactctgactcacttttcctcttaattatatcaacaacctttgaagtgggcataattaataccctgattttacaggtaggaaaactgaggcacagagaggtgaagtgacttgcccaagaatgcaccgctgatcactggaagaaccagaaaatgggaacccaaccagctcacaggtggagaggagggcccccttggactgacctttaaaaatatatagtcattacatgttctgagaaacagccccaggcaatgtcctggaatctgattgctaagagactccaagtggcctggattgtacccaacccagggcctttgcacctgctgttcccttccccagacatttcacttctcatcattcaggtctcagctccaatatccttatctcatttccagagcatcctgtctaaaagatcacgttcttttattttaaattcttcacagagcaaattcctctctgaaatcatgtctttgttaattaatgtattgtctctttcttccctgagttcaggtgcttgtttgtatttggtcaggctctgcctttatgcctaaccttagacctgtctcccaacctcgttctgcacccctgaatgtttgtgacttcttcatcttctcactgtactgccctgcagaagagacaaataacacttacttgtcacatgaaataatgaaaagaacaaaagtgaaatctgagaatagactttaaaaaaaaatgacaaccaaaagattagagtcatggagattctcttctcctgagaaaataaatactgcttttgctcaaatccttacccttctctggttcctggagaaattgtctgtacaatatcaggttagtgagagaaggtttcctggagcccctaaaataaggcagtgtgcaacagccagactccaagatggtcccctctgaccctagccaacaggtattccttcctttgtggttccctcccacattgaagggggctgtgcaaccagtaagatatggcagacatggctgtgtgactcctgaggctgggttctatgagatcttgtggcttctgccttgctttctcttgggtcacctcctctaagggaagccggctaccatgatgtgaggatgttcaagcagtcttatggagaaaccaaggcctcctgccaacagccagagctgattcatcagccttgtatgtgggccatcctggtagtggattctttagccctagcccagcttttaaatggctgtagccctggtccacatcctaaccacaatgttataagagaccctgagagagaaccacccagctaactcacttccaaattcctgatccacagaaactgagatgataaatgtctgttgttgttttgagccactaagttttgaggtggtttgttacacagcagtgggtaactaatacatcaagctgtcagtaaccaccaacattgttcttccaagcccacatagttatcagagtcagaaaaaaatcctctcaatggcctatgacatgacctcatgagagctggctcctgctacgtctctcctttgcttcatactttttcccgcagagtggctgttgatttcagccactatgactctccagcacatttgctcaggcctgctccctctgggggatttggttttgttgtgctctcatcctggagtccttcctgcagtgagcctcatttccagttctctcactccttcagcgcttcctgttcaaatgctctctccccagagactttcctgacctcccttcctaaaatagctgcctccctccaccttctctaccatctcaccctgccttgttcttcttcctaatacctgacacagcatacatttatttttgtttattacctgtcttctcttattagattgtaagctccgaaaggacttggcaatcacctattgggtttcctgctgatgcacaaccacctgagcagtgtggggcaccctcaaaaatgattggttgacactatggaaaacagtatagagattccctaaagaactaaaagcaggacttccattctgtccagcaatcccactactgggtatctacacaaaggaaaagaagtcattacatgaaaaagacacttgcacatatatgtttatagcagcacaattcacaattgcaaagacagggaaccaacctaagtacccattgaccaaagagtggataaggaaaatgtggtatagacacaccatggaatactactcagccataaaaagaaacaaaatgatgtcttttgcaacaacttgtatggagctggaagccattattctaaatgtagtaattgaagaatggaaaactaaatatcgtatgttctcacttgtaagtgggagctaagctatgaggattgaaaggcataagaatgatatcatggactttggggacgcagagaaaggtcgggaaggaggtgagggataaaagactacatgttgggtacagtgcagtcaatgtgccacactgtacattttgatgggtgcaccaaaatctcagcaatcaccaccaaagaacttatccatgtagccaaaatccacctgtactccaaaaactattgaaatgtaaaaacaaaacaaaaacaaaaacaaaaaaagcacaatacttaatgattggttaagtgtggcatggtggctcatgcctgtaatcccaactactcaggatgttgaggcaggaggatcacttgagcccaggagtgtgaggctgcagtgagccattatcacatcactgcactccaccctgggtgacagaacgagaccttttctcaaaaaattaaaaaaatatattggtggccgggcgcgatgggtcaggcctgtaatcccagcactttgggaggccaaggcaggcggatcatgaggtcaggagatcaagaccatcctggctaacgcggtgaaaccccgtctctactaaaaatacaaaaaaagagaaaaattagccgggcgtggtggcgggtgcctgaagtcccagctactcaggaggctgaggcaggagaatggcatgaacccgggaggcagagcttgcagtgagccgagatcgcaccactgcactctagcctgggtgacagagcaagactccacctcaaaaaaaaaaaaaaaaaaaaaaaaaaaaaaaaatatatatatatatatatatatatatatatatatatatatatatatgtaatgttgaagattaaaaatggccaaaaatcacttgatgctccagaagggtagaagggtgtctgtctcccatgtttcctggctctggcctggctctgcaactttttttttttgcaacggaacgtggtagaaacgatagcatgtgcctgccgccgtgaggcccatgaagccttgcagctttcctttccacactcttggaatgctgagaccacagtgctgtgaggaagcctcgcctcgttcactggcccaggaagaggggagtccacatggaggggaacccagaccctggtggagagtccacacaattgctaaatatataagggaaggcatctcatgttcctcccaccccaccccatcctccagctgaatgaggccacacacgtgggcccaggcaaagacagcatggaaccaccagacaacccatgtaaaaaggaagcacactgattttctgtatgctctcaacactcctgacaccaaatatgtgggagattctctcacaccatccaatgctccacttgtcagcagacatggactgggtgtcccacaagttagctcaattatgacactgagtgcccaaaattagtgcagactccagtgattaagggctcaattccacaagactgtccccacccagcttcaaatacccatcataactccccggttgtgacctgtgcttctgacaaagcagctgtaagctgggagttccaataagaacacatggacacagggaggggaacaacggacaccagagcctatctgggggtagcaggcaaggcgggggagagcatcaggacgaatacctaatgcatgtggggcttaaaacctagatgacgggttgataggtgcagcaaaccaccatggcacatgtatccctgaacttaaagcaaaataaaacataaaaaattacaactacctccaccaaaaaaaaactgggggtttccacggccccctcctcaggtttgataatttgctagaacggctcacagaactcagggaaacactttccttactattaatggtccataataaaggctgcaactcaggaacagcccaatggaagatgctgaaggaaaggtgtgcagagagggtgcggcgtttccctgcctcatcaggtgtaccacccgtgttcacctacctgaaaactccccagatcctgtttaggtttttatggagattccattatgtaggcatggttgattaaatcattgcccattggtgatcaattcaacctccagcccttttgccctccctggaggtcaggagttggggctacaaattccaatcctctaatcagatggttggttcccctggcaaccagcccccatcctttggtgtttttcaaaagctacttcattaacataaacttagatataagtgaaataggatttgttatgaataatagaaagacactcctctcacctctatcactcccaggaaattacaagggttttgaagaaacgtgggatgaagacatttcttatcataccatgatagcataccatggaaggtgagaaacaatgagttgttttatatgtcactgcattttgggggctgcttgttacacagcaatagataactgatacattccacgagtaagtagctgtctgacagaccttccttcatctaccctcagcccctccaatccatctccacactgaagccaggacaatgttggaaaatacccatgctggtgtcactgcccagctcactgggaacaatgcaaaggcacctattgctttggggataaagagcaagagccatagatgatgaaccctttcctattccagcatctcctactgtgctgagcctcatcatcctcccctctaccttccagaacttctgggatgtggccagttccctaagaccttcgtatgtcctgccactgtggggtacttgaacacgctatttgatatggtttggttctgtgtccctacccaagtctcatctcaaattgtagtctccatgtgtcaaggccaaaaccaggtggtgagaatcggaacataagggtggtttcctccatgctgttctcgtgatagtgagtgagtttcatgagatctgatggttttataagcacctggcatttcccctgcttgtactcactccatcctgctgccctgtgaagcggtgcctgcttcttctttgcctgccaccatgattgtaagtttcctgaggcctccccagcactgtggaactgtgagtcaattaaacctctttcctttataaattacccaatctcaggcagttctttacagcagtgtgagaacggactaatagagtattcctctgcctggaatgctctctccccactcccacagctaggcaatgccaacacaaccttgagacaccagtttcagtatcacctccacaggaaagcacttctgtaatgctgacatcttatgtaacaatggtccacacacaaatatatttttaatttcacgcacatacacatgcacacatgtacacacatagtgagactccaaaacaaacaaaactctcttcattctaacacatccacgagtggaacttctcagtgagcatttattgagcaacaaccagcttcaagacaccacgaagagtccttaggtccttattacttcttctgaaaataatgttataaagtgatcagttctgaaatggtagaggaaaatctagttaaaaacagaatgtagtcgtagatttgtcaaacagatggttagtgttaaatattttttggacagggttgcctccaacatgttgtctgtgctgtgctgtatccaagaaatccttcccttcctcaattacagggatgcgtgtcctgcttggaatccagcctggcctttggctcaatagaaactccacagacagcaggagagctgaggctccactgtggccatgcagccttgtgtgaaaattctaacggcttctcctcccttggaaatgtttccaccatctgtttccccatacccaggggccaggatgggtgaggtgctcagatcagggccaaaatctaaggaggcagggtgcaaacatcaagtaatcgaggtaattcatattttaatgtaatgtttatttaacatttctgaattaatgcaaaaaaatagacaatgcagaaaataccaacattttaactaaagatgggatctgatgcagttggcattaggaaaagggagggatgtaagtctcgcaaaatactgccttaaaatactatttataggccaggcgtggtggctcacgcctgtaatcccagcactttgggaggctgaggcaggtggatcacctgaggtcaggagttcgagaccagcctggccaacatggtgaaccctgtctttattaaaaatacaaaaattagccaggcatggtggcgggcacctgtaatcccagctactcaggaggctggggcaggagaattacttgaacccaggagactgaggttgcagtgagccatgattcagacactgcactctagcctgggtgacagagagagactctgtctcagaaagaatatatatatatatatatatatatatacacacacacacacacacacacacatacatatatatacacacatatatatacacatacatatatatacacacatatatacatatatacacacatacatatatatatacacatacatatatatatatatatatatatatatatatatatatatatatatatatatacacacacactatctggaatattgaggttttccactgccctttaaattttgcacctgaggccaatgcctcacttgcctgcccctggccatgccgacaccatgtgaattgctcttgggtctcctctccctctccacggccaccaccctagtgttttctattgtatctggcttgaacaaccacagccagctcctaaccatcccctccacgccccagtcttgtccaactcatgaaatgtcactaccacttaacaagccactcaagaccaaattgaggattcattcttgcttcactcctttcctctgaagcctgagtcccacccacctgcaagtcctatcaattccaccttcatctcctactgtctagaaatcgctagacatcaccccctcttccccgtcccacgccatcacctgcggctcagattatcgcaactgactgcatggattttctcagctcctttccgtcctctgcccagactgtcccggaatatggacagattgcactgtgggaatgccatatcagatgcttcggtgctaaagataactgagtctcaccatgataatgttattcgcttgccaagtctttctagttcattcaaagagacgttcctcgtaggtgctggtgtgccttcaacatttccgtcacacttgctaattactttttaaacaaaggagagctttgctcagatcattggcaggcgatggcatctaacccagggtttccagtctcagcactgtggacattttgggctgaataattgtttggtgggtgggcaggagggctgtcttctgcactgtaagctgataagcagcacccctggtctctaccccctggatggcaggagcaaggccctcttccccacgtgtgacaactaaagacatctccagacacttccagatgtccccaagtagacaaagccacccctgtttgagaaccactggtttaggcacacttgtgcatgttgttgttgttgctgttgctgttttttatcattgttctttcttttactctgtcttccacttaagggaggtgacgctggctttccatgcatattcatgatatcaaaactttaaaatgattctcactcgggtgtttaaagttaatgttataggccaagtgcagtggctcatgcctgtaatcccagcacttcgggaggccgaggcaggcggatcatttgaggtcaagaccagcctggccaacatggtgaaaccctgtctctaccaaaaatacaaaaattaggtgggcctggtggcacacacttgtagttccagctactcaggagactgaggcaggagaatcacctgaacccgagaggcggaggttgcagtgagctgagatcacaccactgcactccaacctgggcaatagactaagactttgtctcaaataaataaacaaataaataaaaataaaagtttatgttatagaacaacggtaaatagcacctcatggcctagttcttaacacagatggggcaaaatttctgaaaagtgaacagacaggtaacatctatcccactgatcacttctcccattaaatgtcaagtaaactttctaaattgcaaatctgaccatgtcactctgctattctaaaccctgctgccctctggaaaaagtttttttttaagcatacttaattcttattctgaagcacatttaaaagaaagagagaattgaaaatgaaaaattttgcttaattctcagtatactcagagctgcaaaaatctactggtttcttgggaagagcataaaatattcataaagcctataattatgtctttggtccctttatctaagagcttccttccgtggtaagcaaagcttacaggcattttcccacctagaatcgttttattgtaagcacccatctttgaattacgagtgataaatatgacatctcagaaatcaccagtaatatatttgaggtcaaccacctaaaggagccttcacctagaaattcccaaactaacagctctttatgacgtatagagcctatctataatttcccattcaagcttgtgttcggattgggccaaatatctgcaccacttgtagctagatgtggccatgcaaccaaggtctggccaataggatgaaagcacatgtatggagtgtggactaagagaagccttaaagggaatattgggggtggaatctttctttgcctcacctctcttcctcttagctagaaggcagaaatgctgcctgaattcagccagctctctagacagtgaggtagaagccacctggtgaagaattcagaataacaagacagaaggagcctaggtcctgtgttcattagctccagctgccataacaaaatcacacagactgagtggcttaaacaacaaaaatgtattttcttacagttctggaggctgcaagtccaaaatcatggtgctggcaaattctgttcctggtgaggactctcttcctggcttgcagatggccaccttcttgctgtgtcctcacatggcagaggtggtggggtaggggaagagacctgaactggtgtcccttttcttatgaagataccggttatattgacttaaaagcccacccttatgaagcttatataatcttaattacctctctaaaagcactgtctccaaatacagtcacattgggggttagagcttcaatgtaaattttggtcaaggagcaccattgaggtcatagcagcctctaacagcatagaaccctgaattagactaagatttctgctacacaagagcaagggatgattaaatcccattcagtaattaggatcacctctcaccgactcacattcacacacactctaagacacacaactcccagccacatgccgagcatggtaaccccatttcctactttaacctttgggggagcctgggaggtgggaatcattcttatcccctgtccaaagtggagaaatggaggtcctgaaagagcaactctcttggcagggttggagagtgagtctgtgctgtcaaatgcctcatgtgtgcatttctgacaagatacagagtaatctgagggtggaggaggcgtgaaggtgaatggcaacctagacaaagaactgggaagagatcgacggaaatctgttcctaaaagccccatgcgtatgtttattgcagcactattcacaacagcaaagacatggaatccatgtaaatgcccatcaatggtagactagataaagaaaatgtggtacctatataacatggaatactacacagccacaaaaaagaaggaaaacatgtcctttgctgtaacatgaagggagctggaggccattatccttagcaaattaatgtaggaacagaaagtcaaatactgcaggttctcacttattagggggagctaaacaacaagaacccatagatcccaggaggggcagacctgagggtggagggtgggaggagggagaggatcagaaaagatacctatcaggtactaggcttactacccgggtgacaaagttatctgtacaccgaacccctgagacacgcactttacctatataacaaacctccgcatgtatccctgaacctaaaataaattaaaaaaaaaaaaaaagaaagaaagaaaagaaaaagacccacaagccattcttgctgctggagtcttctggagtttgggttgttgttgttgttgttgttgtcgtattttgttaaaacattcctgttcttctgaaaggatacctggaggctttatctggattcctagggtcctctatccacaaaaagtcagtaaagccacgtctctaattttgggaaaatgtgggtgtgtgtcctaagaccctcatggtgggtggaataatttgctatagggcaagttggagagtgaccaaggatgcctcaaataatgtctcccttttcattacgggggagtgcctttcagaattacacagcaagggtgaattatacgttgactcgtcatctgtgacaaatttcatgcagctcaaggctatcaacagcagctcccttgccaacagcttgcagcagctgccgctgatcaaggcagtcagctcgatccccgtagccttccgtgaaggaccacgggctggtcagaagcagtctgacaggtcacagagccagcccagctgttggggggattagctgtaaggaaagctgatcctatgacacatgctttaggtatgtccgcccctgggaaacgtgaccttcaaggtttgcgttatagaactttattcgcttcaaaagatggagaacacttttgttttctgagtccctggagaatcatgatgcagacagctttggaggtacccaaagaaatggaacacagaatcccaattacatataggccgcacacatgataaacaactgctggtttgggaattgctgggcgaagcttcctttcggcagtttgctcagaatatattgctgatgatttctgagatgctcaattcatcattcacaattgctttgcagtaaaatgcttgcagaagggaaaatagctgtgaacgctgctccccaaggaggaaagcctataactgctggagccaaagatgtcatcgcaggttttatcagtatttcattttcttcccatgaaaccgataagcattcgaagccctgagtgtggtgagaattaagcaagatttgcctctttctgattctttccacaaggtagtgggaatttgaaatgggagaatgatgttgtcctatctgttgtgtggaaagattaccttggctttgcttgtgagaagggatggacgggggggcagtatcatggaaaaagtttgagaatatacaaaggtaggcaaaatagcataagaaatcccttctactcattgtctgcagtcatcagctcatggcccaacctgttgtgtctatacccccatcacatcactggcattgtttgtaaagcaaatcccagacatgataccatgtcctccataaacatttccatatctgtgttttgtaaagactcttgcagaaagctgacttctgaaccaaagccccatgcatatgtgcccttggaaggtcactacctgatactgtctattgctggaaaaagagcagcttgcataagcatttttacccacaaaactgaagctatagaatacactagggaaatgcagctcattgcttgggagttatgcattagatatgctatgatctggttctacaggcatttattgattattgactctttgctaggaactgttttgggcattaggacatggtccttgcccctgagatactcaccatctaatggaagacacagaccaaaaaacaagtaatatagtcaatgtcatgtgtggtatgtaatagcaaaatgtatcccgtactgaatgctccagactggtggaaaaatcataataaaataagaagcaagaacggcagcagaatagctggggtttactgagaacttactgtttcgagcacccaagatacaaagcaacacgttagagaagatggtcattgtttggaaattagagaaaagctgctggaaaagaggatttagagatatagtttggaggaccacaaccagcttgcacatgtttttatggtttagaaatggcaactccagaatttttttttttttttttgacagagtctagctctgtcgcccaggttggagtgcagtggcgtgatcttggctcactgcaacttctgcctcccaagttcgagcgattctcctacctcagtctcccgagtagctgggactacaggcacatgccgccatacctggctaaatttctttctatttttagtagagatgggatttcaccatgttggtcaggctggtctcaaactcctgacctcaggtgatccacccacctcggcctcccaaagtgctgggattacaggcgtgtgtcaccgtatccagcccagaattctgaccgcgtggttctcagtccaaaaacattgtcccccttcctgagtcagatggcaacacaaaaatgccttgggaaccagctgggccatttcatgcagcagtaattctctggatcagtctcctcgtgtgactgatcctggttttaagaaacttgcttctatttcctggtcagaaaagtctctccctcctgcctcatcttttctacccctgtttagacaccactcctagttcaaagcaccattgcctcctgcctggatggttgtagtggtcactcacctggtttcctttcttctactattgctctaccatcatcagctctccttagaaatcagaggatcagtggggtgtggtggctcatgcctgtaatctcagcactttgggaggccaagacaggaggatcgcttgagcccaagagtagttcaagaccagcctgggcaacatagtaagaccctatatcttaacaaaaatatatattttgtatgtatatctttttatatatatatttgtatatatatttatagatgcatctttatatatatttatagatgcatctttatatatatttatagatgtctttatatatatttatagatgcatctttatatatatttatagatgcctttatatatatttatagatgcgtctttatatatatttatagatgtctttatatatatttatagatgtgtctttatatatatttatagatgtctttatatatatttatagatgtctttatatatttatagatgcatctttatatatttatagatgtctatatatttatagatgcatctttatatatttatagatgtctttatatatttatagatgcatctttatatatatttatagatgtttttatatatatttatagatgtctttatgtatatttatagatgtctttatatatatttatagatgtctttatatatatttatagatgcatctttatatatatttatagatgtctttatatatatttatagatgtctttatatatatttacagatgtctttatatatatttacagatgtctttatatatatttatagatgtctttatatatatttatagatgtctttatatatttatagatgcatctttatatatttatagatgtctttatatatttatagatgcatctttatatatatttatagattttttatatatatttatagatgtctttatgtatatttatagatgtctttatatatatttatagatgtctttatatatatttatagatgcatctttatatatatttatagatgtctttatatatatttatagatgtctttatatatatttactgatgtctttatatatatttacagatgtctttatatatatttatagatgtctttatatatatttatagatgcatctttatatatatttataggtgtgtctaaaatatatatatgttttatacatgtataaaagaaaccagaggatccaaaaaaatagagcctgagggtggaaaaaagaaatcagagaagccatgaagaagaaaataagccagacagaatggcgtgcacctgtggtcccagctacccaggaggatcccttgagcctaggagtttgagtccagcctgggcaacatagcaagtgtccgtctctaaaacaattatataaataaataaaatttaaaaaataaattttaaaaagaaaatataatttcatccgtctttcttacacacacacaacttttaaaaaaactttcatggcttcagatcatgcacacagtaacacttgggcttcttaccagagtctgcaagaactgtgatattccagccccaaaaacccctctgctcccgccgcccagcctccatccaggtccctgaggaagccagtatcccccatggctcctcacctcggcacacggcattcccacctctttccctcgtgccactggccccaccaccctcccctgctccagtctggttcctattctccttctttctgttgccacatcaggtgtcactaccttcgtagagccctcaattcacccacaggacagctccctcttacctgcttctctcacacccctcctgtagattttaacgctgggcacactttactttaccctcttttgtccactctaagatccacctcctcctgtccccactctctcacatctctgaaatcaggctgtgtcctacatgggtggcagtcatgcttaagttgtgggcatttttctgtttcctgtgggtatataaagtaacagtacatcttacaatccataccaccatcttggagtctacagaaagcaccatgtgtttgcacaaagtctgttttccttgcacagagctggaggatgagtcccatggctagtcccggggccaagcacagctcctggtacaaagtgaggctctgcccagaacagggccagacacacccttgatgcatcaggtcagattcaagaaccaggtggttccaaacagcagagatcgttttgaagggtaaagagataatgcatttgtgttacaagttaataaatgatattacagtcattcgtgggcaaagcaaggcaaaggggccagaggacttagttatcatggtccacagagaccttggaagagaaaacatttgaattgaagcctgaatgggagaaggaaggagccatgcagagagctctctggcagaggagacgtctcaatagagggtttccagatggagggattctcagccttggcactcttcacatctggggccatgacagctacgtgagtgcatgcggtggtcccagctacctgtcccactgcactccagccaggatgaaagcacaccctccctgaccaccctcaagtgatctggcacctgataagctctgacgtggcctcctgtcccatccttcctttctctctctctctctaatttttttctttttgagatggagtcttgaaagaaggaaggaaggaaggaaaagggaagagagaaagaaagaaaaagaaagagagagtaagaaagaaagaaagaaaaaagagagagaaagagagagacagaaaagaaagagaaagagagagagagggagggagggaaagaaagaaagagagagatgaaagaaagaaagaaaagaaaagaaagagagaaagaaagaaaagaaaagaaagaaagagaggagggaaggaaggttcttaggatgctataggtcaaggtttcaacctcggaactattgacatttggggttggaccagtccttgtggggccgtcccatggcttgcagggtgtttagcaacattcctggcctccacccactagacgtcagtagcactcccctctccagtggcagcaaccacaaatgtcttcaaacatttctaagtgtcccttgggaaaggcaaaatcaccctggttgagaaccactgctgtggaagacttcaaccatgatgaacattaagccccatcactccgttcaaaccaaaaagtgataaagtctagagtttactagaggtcagtggtatgccaggaaccatgcttcgcttgggatgcaccctttaaccatccagcaaccccaccaggtagagcatggcatctccctgtgttacactggagaaaactagagactctgagggtttagtcaccttgctgtaggtcatgtgtagcaggggcagaccttgcatcccaacaggaggttctgctggctctgggacctgggctctgccctgtaccgtctccctgcttacagactcaaaagcagtatctcctaacatctcagcctctgcacgtgccattctccaggcttacatacagctctgctaactccccttctttctttattgagttccaggacactctaaagaggtcacttcctgctgggcacagtggctcatgcctgtaatcccagagtcttggaaagctgagacgagaagataacttgagtccataaattcaagatcagcctgggcaacatagtgagacagaccctgtctctacaaaaaattttaaatattagttgggccatggtggcacacacctgtaatggcagctactcaggaggctgacgtggggggatcacttgagcccaaaagtttaaggttgcagtgaaccctgattatggcactgcactccagcctgggcaacagagagacagagtgcctctattttttttaaagaggccacttgctatcagaagagtttcctgagcatcccccgcaacctcaccctactcccatttttgctatctccatgggccctacttctcctctcttagctccaattatgctataatgcagcacatgcatttttgctgatctgctgacttgcctcattggtgtgaagcaacagctgggacagcaactgctccacattcccccggatcctccttcaacttctcccactcctgggccaaaggtgtgcatttagctccatagcaaagtgtcatggcttctgcagaacactctggtcaccaaggcgagaggcaacacaggtggacacgggtttcagtccatctttgtggggctcctgcttgtccttgctctacctggctctacatctatcttctcttcttgacttcctgtcctgtggacttcaagcaccaacatcagaaacaaataaatttccttgcagaatcttcttaaccagctgcacaactgcttaagatcaaattctagagttcctgcctctctgcttgagcactgacatactttggtatcagactatatagttattgcctgcttgctttcctgtcttctcccaacctactcctccaaacctaggaattgctcccccgtttcctagaacctgccactccctctctgaaattctgagctccgaagggcaggaaccccaccttattcagttaaaactgctttcatctgaaaaaaggtcatctaagttttcttcccactgattcatcttagtaagatggtcaaatgtcttagcagtggagtaaagactttggaatctgaagtaaaacagacctagacttagttctttgtttcttcccttttcaagctatctaaccaagggctgagccttagtgccgtcaagagtaaactgggagaagaagattactacatgcagtggtgttgtggagaagaactgagagaagccatgcaaacgcttcagcacaatatctggtatcagtaggtgctaaatcttggctctcagctgtcatgattttgagtttggctgcagaattcagctcagagggaggcccacacgatttcgatttgccccagattcaaattccaaatgcacagagctctactgatccaatgagaagaaagtcattcggtgcagtgattcccaaattcttccttgatgttcagctattccttccttcagcactcggtgaccatcttctgtgtgccagaggtctgtaatttttgtctttgttgttgttttgttttgttttcaagatggagtctcgctctgttgcccaggctggagtgcagtggcgcaatctcggctcactgcaagctctgcctcccaggttcaagcgattctcgtgcctcagcctcccgagtagctgggattacaggcatgcgccaccacacctggctaatttttgtgtttttagtagagacgaggtttcatcacattgtccaggctggtcttgaactcctgacctcaggagatctgctggcatctgcctcccaaagtgctaggattacaggcatgaggagccactgtgcccagcctgaggtctataattttgaatccacacgtcatgtggctgccacgtctggaaaatcccatctccagggctctccttgactccatactcagtcccatcctttccattcaccagcctgagcctgcccctgttccccaggcaaatgggagctctcctggaggcaggtcagtgattccgaaatgacttcaatgggagagatggaggacagtgcaaggggtgcaaccacaggcttttgcatattcatcatgttgggttgctacaggagcatgcacatttggctgtgtaaacctcgatagaccttattagaaattacaatgttcctgcaaaccctagtgatataaaaaaactcttcccccaagtcaacttttttttttttttttttgagacggagtctctctctgtcacccaggctgaagtgcagtggcgtgatctcggctcactgcaagctttgcctcccaggttcacgccattctcctgcctcagcctccccagtatctgggattacaggcgcctgccaccatgcccggctaattgttttttttgtatgtttagtagagacggggtttcactatggtctcgatctcctgacctcatgatccgcccgcctcggcctcccaaagtgctgggattacatgcatgagccactgcgcctgactgagtcaacttttattttaaaaatactaacccactctctcctccagtcacataagatgcaaaaaaaaaaaaaaaaaaatgccaaggagaagaaggtggccccagtccctgctgtcatgaagaagcaggagaccatgaaactggtgaatcctctgtttgagaaaaggcctaagataagaatcttggcactggacaggacatccaacccaaaacggacctcacgcgctttgtcaaacagtctcacgttgcagtggcaaagaaccattctttccgtgagtggctgaaagtgcctcctgcaatcagccagttcacccaggcctcagactctcacgcagccacccaactgcttaagctggcccagtacacaccagaggtaaagcagaaggagaagcagagactgttgtcctgggctaagaagaaagctgtcagcaaagggaacacccctacgaagagaccacccatccttcaagcagggttaacactgccaccaccatgttcacacacagcaagaaggctcagctgatggtgactgcgtgtgacatggatcccagcaagctgtctgtcttcctgcctgccctggattgtaagatgggagttcctgactgcattaatgaggggaaggcaagactggggtactgagtccacaggaagaccagcaccactgttaccttcacgccagttaacttgggagacaaaggagctttggctaagctggtggaagctaccaggaccaattaaattaacagatatgatgagatctgtagtcactggggaggcaacatcctgggtccaaaatccctggcttgcattgccaaagctggaaaaggcaaagactaaagaacttgccaccaaactgggttaaatctacactgctgagttttctgtacataaaaataattaaaaattctcctttaaaaatatcaagtagctgcttctttagagctaggcaccggattacccactgggaatacaattgcgagcaattctcttaaaaaaaaaatagatatggccaggtacagtggctcacgcctgtaatcccaacagtttgggaggctgaggcaggtggataacctgaggtcaggagttcgagaccaacctggccaacatggtgaaaccccgtctctactaaaaatacaaaaaattagccaggtgtggtggcacatgcctgtaatctcagctacttgggaggctgaggcaggagaatcacttcaacccaggaggtggaggttgcagtgagccaagattgcaccattgcactccagcctgggcaacaagagtgaaactccgtctcaaaaaaaaaaaaagaatcagctcaaaagaatcctgatgtcaaagagacacatctggggacagcatattctggtcccctacacaggaaatgcacagatcttgaacacatcggcagaagcaggcttctcttgtctcctggtagcatcattacccccaactgtcttcacgctcattcaccaaaaattatttatttcatcaattcatcaatttttgcttgtcaaaaattggatatgatattggcatgcatctatggggtactgattaataataataatagagttttttttttaaaaaaaaggaaggccaggcaaggtggttcacgcctgtaattgcagcactttgggaggccggggtaggcagatcacctgaggtcaggagttcgagaccaacctggccaacatggtgaaaccccgtctctactaaaaatacaaaaattagccaggtgtggtggcgcatgcctgtaatcccaggtacttgggaggctgaggcaggagaatcacttcaacccgggaggtggaggttgcagtgagcacagattgcaccattgcacaccagcctgggcaacaagagcgaaactcagtctcaaataataatgataataataaataaaagatggaatactacacagctacagaaaaggaacacaggagtgcttaagttccaaaatggcatgatctctaaaatatatttttgtgaaaaaacaagatacaaaacaatggatttaatgtgccaaattttataccacaggggagaaatgtataagcacacctcctgtgtgtccacagacacctctgttttcttgcttgtatcattggttgcctccagggaaggaaaccaggtgcccacaaaactgagaagagagtcttcacgaaatctctttctaaaccttttaaatgtatcacctattcagaaaatgaatggaattgaatttacaataaaaatagcactaaaatataaaataaagtggaaggatctgttgtccagagagatagagacagggagagggagtgaggcctgtgccaggctgtagatgcagttgttgtgattgagttttctggcgccaggctcgtgggctgaagccccagctccacaagttactagctgtgtgctctcaggcaagttacttaacctctctgggcccgggccacctctgtaaattaagcatcataaaattacccccttcatgtggttgttaggcaaattaatgaatatggtaaaatgcttgaatacagggtctggcccagagtaggttgtgtaatcatttctacagctacttttctccatcccgggctgctaatgacatctgtatgattagcagtactctgcgctgagccctgaggatgctggggaggtagtgatgcccaaggaggaactctccaccccatagcataggaatggccatacatcctagtagggtgaggactccaggctgggccactgcagagaaaggcgccagccccagttaggaagacgtctacacgatgtgttgcctgagaagagtacaccagcctctctatgccgaagcctggttctactccatcctggctactggacctcagataagaagtcattgaactgccctgtgcctcggtttccccatctggaacaacagtatattgatagtgtcaacctcggagagctgttgtaaagatcaagtgagatgatcctatgaaactctcagcacaggcagctattattattattgctgctgttgttgttgttaaggagcgaggctctgaggagtgggtaaggataaggtgggtacagataagcatgggatggtgcacgcgagaagcaaagtttagtgtttttggaaagcagaaaagggctcagcgagtcagtgtattaattttctagagctgccatcacaaagcgccacacaccaggtggcttctacaaccgaaatcaaatttctcatggtcctggcagctggaagtctgagatccacgcgtcagcaggattggcttctcctgaggcctctccccttggcttgcagacgccatctttaccctggatactcacgtggtcgtccctctgtgcgtgtctgtatcctaatctcttcctataaagacgtcaatcatattgcatgaggcctaccaccctaacaacctcattttacctgaattacctcttcaaggaccctatttcaaaatacagtcatattttgagggcctgggggcgaggacttcaatatatgcatcttggaggacacagcctcgcctgtaacagccccaagcccaggaggtgggctgggcagtggtaagaggaggctggagggtttggtaaaggctggatctgggggtctattttacaccacagtcagcagcctggcttccaccctgagtgcggtaggagcccccatgggtcacaggagggcagggtcacactctgtgtccaggcaggacggcaatggctccctgtgggcccaactggatgctagaggaggctgtgtggaaatccaggcaaaggctggagacacggctgggtcagtggggtagacaggtctgggtggaagagagtttgcacccatgccatcaacgcatgagcatcttggcttccacctcccctactagcaacaaagctcgtaaatgagctcgcacccctgcctctcccctccgctccccttctccatgggaggaaaagggactgggtctaatgccgtttctttctcaagctctgcctgtgatttctttcctgttgtagattttagactaactctgtggcgccctctactgaccaggtgcgtctcgcccagagcgctgtccagccccttgaggtccagtcccgcggtctgaggccaccgtgactacagacgcttgaagaggagctaggggaattgaggtgggctcaaaggaaaagcacacgccggatctcagagactttgttaccaaaaagcactggaaaatatctcgttaacagtgttgtgcaatggctgcatgttgattacatcatcgtattttgaatatattgggctaaataagatacagtctttttttttttttagtcggagtcttgctctgtccccccaggctgaactgcagtggtgcgatctcggctcactgcagcctcctcctccctggttccagcgattctcctgcctcagcctcccgaggagctgggattacaggtgcacgccaccacgcgcagctaatttttgtatttttagtagagacaggatttcaccatgttggccaggctggtctcgagctcctgacctcaagttgatccacccgcctcagcctcccaaagtgctgggattacaggcatgagccaccacgcctggccaagatacagtcttcaaattatttttacctgttcttttttactttattaacataggtaccagaaaactttaaatgatatttgtgactcatataatatttctttatttccccctgctttagactattataaatgtaatgtatacataccagggattcgcaaattcggcactattggcatttggggctggataactcttggtgatggctctgtgctgtgcatttgtgggatgttgagcagcaaccctggcttctacctatgaaacgtgagtgtccctgcctctcacccaattgtgacaaccaaaaatgcctccaggcattgccaaatgtcccctggggcacaaaatcactcccaatctagaatcattgaaatatatatgtatatgaaaaagagacattgatgaaatgaaaaaccatgaactctaaggacttttgactcttacagagcaccatcctgtgtgagctccgtgttgcatgcccacctgtgtttccctctcagtcctcataatgaccctacagggtggacattatcattatgccctttttgcagatgaggaaactgaggcactgggtggttaagtgactggccctgaggtgcactgctaatgggtggcccagcccagacccaaatccaggccacgtccccggtgtaagagaggcgagcgtgtgcctggcacctgcagacccacggtgagaacccagatctccactgagtgccccatccctgacgtggaacctgagtcctccctttggggaggaaggtgaagaagtgggtaggagtcacgattaactttacctcccttggtggccaaaagaaaccagaaaataagctccattccaaccccttcctgtggaattatgatagagcaggaaagcatagcagagcacggtggctcacacctgtcatcccagcactttgggaggctgaggagggtggatcacttgaggtcaggagttcgagacctgacctggccaacacagtgaaaccccatctctactaaaaatacaaaaattagccaggcgtggtggtgtgcacctgtaatcccagctacaagcaggagaataccttgaacacgggaggcagaggctgtagtgagccgagattgagacactgcactccagcctgggagacagagcaagactccatctcaaaaaaaaaaaaaaaaagaacaggaaagcaggaatccattcattcattcattgcagtcaggtcgtgtgtatggaggccctgctgtatgccaaagtctattgaaggcagtgagagtgcagccatgaagaaaacaacacagctctgctcaggaaactcaccgacactgaacaaggatggggaatcacagaaaaaggaatttaaaattaattaattaattaaaaaaaggatttcaggcctagacaagttatttggagaaaataagacagagaaatgactagcatgaggacagacgtgaaagactccagaaacatttttctaaggtgtctcccgggagtcacatgtttaatccgcattgcgggtgattctgcagtgagggagggggcttagggcatccttggcaaaccctgccttggacccagcctgggttagcccccctaggcccatggggggttcagggtggaggagaagcagcctccacccagaccctcttctgtgtacccaacccccaagtctttagggagtccccgcggtgaggccaggctgggatctgaacccgcaggcatgcacaggctaagccctgagcctagaaaattccaggccccgcatccctccagcattggcacagcccctcctcttctccgcggtttccatggcaacagctgtcgccaggtgagatctctcaggggactgagcctcccaggagccaggtggggatggggagggctgggcgcattcatagtccactcttgactttgatgcagttaaacgcatcctcagacaggggtctttgcagaacagggcagaaaaacaggcctgtgcgggtctctgcagcctctggtagaaatcccagatcgccagaaatgactagtgacagaaatgatatctgtccgccctttcactccttcattcattaaaccacttaatttttgcataaagatcaattcgatcagtatagatgattaatatgagagttttatgaatctattaatgctgtatctatttcgagctgctggcattgttctagggagacagtattgatgaagaaaatacctgcagtgcttccttaacagggttggcttagatggggctgccgcacaaaacaccgcggaccccgatatgtaatatgatggcaggctttgaaaagttctgtggagacgagtaaagcagcccgtgttgtttgggatttaatttccttcattgtgaagtggtgatacattcgcagagtcaaaatgacattttaagatgtgattttaactctgcgactggaataatttctggggaaacattgtgtaatgaaaattaaacctcatgccctcatcccaaggcacccgacacccctcccggaagccacgtctgttccacgttccacattccttcttgaataattctgagcacaccgtattgtcagctgccctccccaccattttatttatttttattttttaatttttttttttttgagagttttgctcttgtcatccaggctggagtgcaatggtgcaatcttggctcactgcaacctctacctcccaggttcaagcgattctcctgcctcagcctcctgagtagctgggactagaggcacctgccaccatgcccagaaaatttttgtatttttagtagagacggggtttcactatgttggccaggctggtctcaaactcctgacctcaggtgatccgcctgcctgggcctcccaaaatgccgagattacaggtatgagccaccacgcccgaccagtctgtgtatttgtttgtttgtttgtttattgagacagagtttcactcttgttgcccaggctggagtgcaatggcacgatcttggctcaccgctgcctcccaggtacaagcaattctcctgcctcagcctcccaagtagatgggactagaggcacctgccaccacacccagaaaatttttgtatttttagtagagacggggtttcaccatgttggccaggatggtctcgaactcctgacctcacatgatccgcctgcctcggcctcccaaagtgctgggattacaggcataagccaccgcgcccggccggcatactcacttttcatatacaattagagcatcccattgtgtcattgtcctataactcatttaacctatctcctcctcatggatgttcagattgtgttcaatctttcatcataacaaatgctaatgctgctgcagtggattaccacagaagcatgttccttcacacatgcgtaagtaaatccgtacaatatatttctagaagtggaatttctcagtaagaaagtacaggcatccacattttgctaaagtgcccaccataaaggttgttccacgttgcacgtccaccaataacatatgaaaattcaagcgccattgaaacccataaaatatggattttcccttgaaaaattagaagagctaacaacactgggtttgatttcagcttgggaacaattgggtggtgtctggtggtactgcccacttcagcaaaacacactctctcccttttttccacactccccacccctccctattacttcccaatgcccccactctgtatcagtgtctgattaggatcatgcttgaggtgaccattgccatttcataggtgacgttactttacaaccttgagaatattgaggccaaaagagtcacttatttgaagaaaatgccagaccctttccaaccaaaatggttgtgccattttatactcccaccaacactgtgtgctccttccagccaccccacatcctcaccaacatttgatgttgctaatctcttcatttttaccgttctggtgagtgtgtcgtggcagaatcacttattttaagaaaaataaagggccaggtgaggtggctcacgcctgtaatcccagcactttgggaggccagggcaggtggatcacttgacgtcaggagttcaagaccagcctggccaacatgatgaaaccccgtctctactaaaagtacaaaaattagccgggggtggtggcaggtgcctgtaatctactcaggagtctgaggcaggagaatcacttgaactagggaggcggagcctgcagtgagctgagatcgtgccaccgcactccaacctgggtgacagagcgagaccctgtgtcaaaaaaaaaaaaaaaacaacttgcatttggcccgggcgcggtggcccacgcctgtaatcccagcactttgggaggcagaggcgggcggatcatgaggtcaggagatcgagaccatcctgactcacccagtgaaacctcgtctctactataaatacaaaaaattagccgggcttggtggcgagcgcctgtagtcccagctactggggaggctgaggcaggagaattgcttgaacccaggaggcggaggttgcagtgagctgagatcgcgccactgcactccagcctgggcgacagaacgagactttgtctcaaaaaaaaaaaaagaaagaaagaaagaaaaagaaaagaaaaaaaagaaaaatgagccaaggaggggaggctgtatctttatggaaatggagacattccacattgttgaatacacacaagccccgcccactctctccccctgcaggacctccccagcctctggggtggaagtctttgccttgggcttcagaaatgtctgagaacacgggagtgagctcttcatccaggtaagtcatgtccccacgggttgctcctcccactttactgttcccttcccttgattctgggtctagacagagacattctcttactacctggggaggttggggcagaggtgggtcctttaccttccagagtctggagagtaaccaggatttgcttttttttttttttttttttgtcggagtcttgctcagtcacccaggctggagtgccataatagctcactgcagccttcaactcctgtgctccagcaatcttcccacctcagcatcccgagtagctgggactacaggcacgtgccactacacccggcaaatttttttttttttttttagatggagtctcactctgtcacccaggctggaatgcagtggcacaatctcggctcactgcaacctctccctcctgggttcaagcgattctcctgcctcagtctcccaagtagctgggactacaggcatgtacagctacgcccggctaatttttttttctctttctttcgtagagacaaggtcttcatatgttgcccaggctggtctcaaactcctgagctcaagtgatcctcccatctctgcctcccaaagtgctggaatgacaggcatgagtcacctcactcatttttgcattttcaatcatccatctccctaatcctccccatttgatgcaagtgaagttggggacacattgaaaaaaaaatcctggctatgctgtggcaggcatagtgcccagtgattcacaagcagcttcccactgtcatcctcaccacaacctacagattcaaaaaaaaaaatgtttacccagttttagatgagaaaacaggctcagaaaagtgaagtcactttcccatgattccgtactttattttgttttgttttgttttactttattttttgagacagagtctcactctgttgcccagcctggagtgcagtggcacaatcttggctcactgcaacctccacctcccaggttcaagcaattctcctgcctcagcctcccaagtagctggaattacaggcaccctccaccacaccccgctaatttctgtatttttagtagagacagggtttcaccatgttggccaggccggtcttgaactcccgacctcagatgatcctcctgcctcggcctcccaacgtgctgagattacaggcatgacccgccatgcccagctgtattttcattcacgctcctaacacacacacacacacacacacacacacacacacaaatcattataggcactcattcatatggcagctcaggattctaacccacacacagcctggaaagttccatcctctgagtgcctctcagcctcctccccatctcctcgatgcagtttccatagcaacaggcagagcctgcctgcatcccagacccccagcgaaggctgctaaggaccagggcagggcgatgggggagaagccgagcagggggagggagcaggcctactgtaccccatcggagattcaggttgggcatattaaaacttaaaatgtgcacatttaaaatgatgtccttgacgaagggcaaaacccagccatgtgtgctttgccaacaggcgtggaaatcacaggtttctgttccgtggcagccgccagcaccgatgatacaaacagcctttgttgtctaaagattagtcatttgattgactgattataccaacaaatatttgttgattgcctactgtttgccagaccttgtgcgaggcggcagcatccaacacagatgtagtctttgttctcattggagttgacaacttattgagacagataataaatagatattgaagtggatatagctatagagctagggctggagactgaggaaagaaaagaacttctgtctgaggaatgtgagggctttcaaatgatcggggccggagaagcattaaaatgacgcagcagtcacaccctactcccagctttcagaatctcttgaaactgcttgctattgccataagtagctgcaaattaaacagtccccagtgggacactaaaacccataccctatagcttaacaattgtcagcagtaaaaaccagattctgccaaatatttaaagaggtttattgtgaaccaggatgagtgaccgaagcctggggttacacagtctccagaggtcctgaggaggtgcgcctgaggtggtcatgttccggtttggttgcacacatttcgaggagacaggaattgcaggtaaaatcataaatcaatacactgagggtatacatgagctcggcctgaacccgtggacatcttgaagtcaggggcttacaagtcatagtaggttttaaagattcttttttctcactccttcctgcatactgaaaacgtttcttgaggtgtgtgtgtgtgtgtgtgtgtgtgtgtgtgtgtgtgtgtgtgtgttttgacacagttctcactctgttgtgcagtggcatgaccatggctcactgcagccttgacctctcaggctcaactgatcctcccggctcagcctcccaagtagctgggaccacagatatgcaccaccacccccgcctaattttattttactttttgtagagacgggttctcgttgtgttgcccaggctggtctcaaacttctgggctcaagcaatctgcctgcctcagcttcccaaagtggtgggattataagtgtgagccactgagtccagccttaaggattctttagttggcaatttgaaagagttacactttgtttaaagcaactcagtagaaagaaatgctgaagttaagggggtctggtctccatcacacgatgctataccagagatgggttggaagtcagccacctgatactgcgttaataaaagaacctgcttaacaagattttatggtttgtagagtgtgactacctgggccacctagataggaatttaggtaagagagaaaaaggtcgcagagtcctcacaatgcacacctaatcactaaccaatgttatttctgtaaattgtaaacaaaaaaataaaattctaagccccccaacctactgatggaccctcccctcagccaggggcattccaaagttaacctgaggctgggtgcagtggctcatgcctgtaatcccagcactttgggaggccaaggcaggaggatcacctgaggtcaggagttcaagaccaacctggccaacatggtgaaaccctgtctctactaaaaatacaaaaattagctgggcatggtggcacacacctgtaatcccagctactcgggaggctgaggcaggagaattgcttgaacccaggaggcaaaggctgcagtgagctgagatcgcgccattgcactccagcctgagtgacagagtgagacgccatctcaaaaaaaaaaatccacttgtggctgggtgcggtggctcatacctgtcatcccagcactttgggaggtcgaggcgggtggatcatttgaggtcaggagttccagaccagcctgaccaatatggtaaaaccccatctctactaaaaacacaaaaattagccagcatggcagcatgcacctgtagtcccacctacttggggggctgagacaggagaattcctcgaagctggaagacagaggttacagtgagccgaggcaacagggcaagacaccatctcaaaatacataaataaataataaaaataaataaaaattaaaattcacttgtaactgctgctaatcagagtgtgaatcaggggaagtcaaatctgtgctcttgggttgtaatcctcaagcttggcccaaataaactcttaaattagttttgcctcagcttcttccttttaggttgaaaggatagagacacacacatatatgcatacgtattttaccataatctatatgtacataggtagcaccatatagaacaaaattttttgtagttttgtcttttgacattggaaagcacagctctaaaaactactaagaaaaaatatatcaggataaaaataaaaagagcagcagattgtgacggtgaatgaatactttgcacaaaatattttgtttcaggacgtccaggtcgtagccaggaattgacatttcgacaagcccctacctgaaccaggtgaccaccttggtagcagaccccaggcaggcaggcaggcagggagtcctcagatcctcccaacagccctgctagctaaggatggtgatcacacctgctgcagaagagtggaccgaggcttcagaggggaaagcagtgaccaaagatcagattgtgcctctccatctcttcccaaataataaatacaggtatttattgtacccctgctctgtgcccacacggggcttttacatccacgcattctgtgctcaagggcatggaaaattccagcctgaaagccttgcttgccccatcctgtcccccacactgcagtggtttccatagcaacagtcttggtcgcaaacatcccttgagtcccctgaaggggaggaggagtggttgatgtcagaatagcctgggctgagggtggtgggacaaggggaaggattgaattctgcaattcccaccccaccccatattcctggttcactcaagcctttagggttcattcaaggtctccttgaatggggttttcgtagaagaacgaaaaaggacctgggcatgcaagtggctgctggctcaaaaaaaccaaacaaatagaaatcccaggttctccatggagcagctgccgcaggtgcctgtgacacccccagcatctatgcccacctttcagtcgcgcctcattcctcctccaacacaagttgacagagagcatattatgtgccagggataatgttaggcacttgagcataatttcaaaaacctgctatgatgaataaaaactggtctccaaaagcctcaagtgtctccccaaaaaaacacaaatgcatgaggtcctcttattctcatttcaaaagatgtggggaccctgttttctggcacgtgggaaccccaaacacctggaggaactaagaggaaatgaatgaaactcaagactcaaccatcacccaggacccaaattacattacttttgagctcagcagagtggggaaaggtggccagtggagaccgttaagggagacacattcagaaattaactgctgttgattgcaagatgctgcgatgattcaacccaactcaaaaatctcaggacatgtgcttcccagttgaacttttgatggttggagagattctcagtaattgtgtatggcagaaaaagaagcatatggtatatggaacacacagcactgaacatctgcttgagcaaatgtttgtttcttttttcttttccatgaaactgcataaactgtcaacgttttattctaatgattatgggccttttcatgggttatgtttttttcaaaagcatgcccatcctggctctaaaatatcacggtcctcaacagatggtggcagtttagaagggagcgtttgtgcaaaaggccatggagaataaacttaaggtgtttgtcttcagagagagaacacaggctgaagaattaaaagagaatgacaaaaacccacacagataggtgttctgaaatataggccaggtgcagtggctcacacctgtaatccatgcactttgggaggcccaggtgggtggatcacctgaggtcaggagttcgagactagactagtcaacatggtgaaaccctgtctctaacaaaaaatacaaaaaaaaaaaaaaattagccaggcgtggtcgtatgtgtctgtaatcccagctactcaggaggctgaggcaggagaatcacttgaacctgggaagtggaggtcgcagtgagccgagattgcaccactgcacaccagcctgggcagcagagcaagagaaagatcgtgccactgcactccagcctgagcgaaagaaagaaggaaggaaggagggaaggaaggaaggaaggaaggaaggaaggaaggaaggaaggaaggaaggaaggaaggaaggataaaagaaatatacagggtataggggagttagcaccagcctgggccacattatttattccttctggcatccctctgcctggtcacaagcaaacttaaaacattgccagctctgtgttttaataataccatgtcttgtaatagcaaatgactggggaaaaaacctcaatttccctccagagggggctggccaactaagttctgataaatgcattcgatggaatgttatgcaactgtgtaaaattctgaagaagttctttaggggctgaacaagcagaatatacagtgaaaggatatataataatgaaaagggttgctatgattgtgtaaaaggaggaaaagagaaataattacattgacttggtccagaaggaacctgaactgtaaatcacagttccatgaggcaagggggtcagattttgtagcccctaacatcaaacattggctgcccccaattgtggggagagatgaggtaacctcccgggtgtctgtggatgaggtggttccaggggcagctcttcagaggacaaggtcattagctgcgcctcacccacactgcctgcccaagtggggttggggcatccctgtgtatgtgctttcagaatttcaaacttccttccccatgaacggagtcctgtatttcatccgatggacgatgctgtccactgtggaggcaccattatttcctagccaggaagaacaataaagcatggtcaattaatgcaactgactgtaaaaggcagcccaattcctgagactgtgtaatgagtggaaaaaagtgagcaaagtggggaagaaagcaaaagcatcttaaagtgaaaaacatgcattagctgtcgtaaacaaacacacacaatgcccagggcactcctcccacagtggagcactcactaaatgaatgaatgacaggccctaccacaccccaacacacacacacaatctacccagtgtgggggggctcttccccagaactcctcccacagtggagcactcactaaatgaatgaatgacaggccctaccgcaccccaacacacacatacaatctacccagtgggtggtgcttactgctcagctgagtactgctaaaaattgccgacaagacttactctctgggtgatttgatgaaatccttgatgccagggggaccactgagtttaacgggcgtctaatctcctcacacacccccatccatgtcaaatgggaggccaggcagggcacagtggctcatgcctataatcccagcactttaggaggctgaggcaggaggatcacttgaggcctcaagtgaccaggagttcgagaccagcctgggcaacacagcaagaccccacctccacaaataattttaaaaattagccaggcatggtggtgcctgcctgtggttctagctacttgggaagctgaagtgggaggatcgcttgagcccagaagttggaggctgcagtgagctaggatggagccactgcattccggccagggtgacatggtgaaaccctgtctcaaataataataataaaatataaaagggaggccaacaggctctggcagagaccttctgggcaactccaccaagaaatcaagtccccatctccagaaaccccactttgaggtccagctcatggcttagctgcaggcgagataggatagacaaagagaccatgtgagtcagggtcctctggagacatagaagcaacgggacattcattcattcattcattcattcattctcaggaattggctcttgcgattacagaggctgagaaatccagacccaagagggccagtggtgtaaattccagtatgaatcttcatcccaaggcagaggcagtctgaggtcccaactcatgcagtcaggaagagaggaaggatcctttctcactcagctttttgttttatgcaggcttttgactgatgagacaaggcccacccacactgtgtagggccatctgttttagtcagggtatagatttgaatgccaaactcaaccagaaacatcctcacagacaccccagaaatgatgcctagccaatatctgggcaccctgtggtccagtcaagttgacacaataaattaaccatcacagatactttttcatacattttattattgtactaaatattcttttgataaatttggaatttagggtaggttgaagactgtgaggagggagtagagtggggaaaaggaggatttgaggtaagatatggttttgggggcaagatgatataaacttttattttgcaaaaatttcaaatttataaaagcaatttcaggaatgatgcaaataactcccatttaaccttcacccacattcaccaattgataacattttgccacattttctatctctctctcactctttttttttttttgagatggagtcttgctctgtctcccaggctggagtgcagtggtgagatcttggctcactgcaacctctgcctcccaggttcaagcaattctcctgcctcagcctccgagtaactgggataacaggcgtgcaccaccaagcccagctaatttttgtatttttagtagagatagggtttcaacgtgttggccaggctggtctcgaacccctgacctcatgtgatccgcccacctctgcctcccaaagtgctgggattataggcatgagccaccacacccgacctctctcactctttttctatctctttagtgtaagttgcagatatcatacccctctgctcctaaatttttccgtgtatattttctaagaataaaggcattcttttttcatagccacagtacaatgattacattgagaaaatttaatattggctgggtgtggtggctcacgcctgtaatcccagcactttgggaggctgaggaaggcagatcacaaggtcaggagattggctaacatggtgaaagcccatctctactaaaaatacaaaaaattagccaggcatggtggcaggcacctgtagtcccagctgctggggaggctgaggcaggacaatggcgtgaacacgggaggcggagcttgcagtgagccgagatggcgccactgcactccagcctgggcaacagagtgagactctgttatatattattatataataataataatattgaggcattatattcattttatgcatagcccatgttcacacacaaattattccaacaacttacttgatagcattttcccccaatcctggatcaaacccaccgcttgtttaaagtggtgtctggcactgtgaagttatttcccctcgggattaattgtctgtggaaactgctttgaggctatggacggctcctgcgtcttctcatgcttgtgcccacgaggcctaggatcctttgatggttcttagatgctttgatggtcctggatcagatccaggatgatgcattctgtttagccatcttgtctcttgagtctttctaaatctggatttgaaacctcagctgttcctcatcttcccgacactggcgtttttgaggaatacagagattccggagaaggtctccacaatccaggtcatttgtctgatgcttccctgttctttatttcagatttgcattttggttcaccagtgacttttttctttctcggcactatgttcaactcgtgatgacagttggttccaatggtggtgatgtcagctttgatctcttgttaaatgtggcgtctgccactgtgaggctcatttccccttgtaactagtcatctgtggggaactcccatgaaatgacaatgccctgcttctgctcatgctcatgtccacggggtctagggtctagggccctttaataattctctctctctccttttttttttttttttctggagacaaagtttctctctgtcacccaggctgggctgcaatggtgcgatcttggctcaacctccacctgcccggttcaagtgattctcgttcctcagctgcccaagtagctgagattacaagcacctgccaccatgcccagctaattttgtatttttagtagagacggggtttcaccatgttggctgggctgatctcaatctcttgaccttatgatccgtccacctcagcctcccaaagtgctgggattacaggcgtgatctctctctattttttaggagacaggtctcactctgtcacccaggctggaatgcagtgagttcgtgatcattgctcatcgtaacctcaaactcctgggctccagtgatcctcccaccttccctccctagtagctgggactacaggtgtgcaccaccacacccaagctattaaaaaaaattgtagagatggggtctcgctatgttgcccaggctggcctcaaactcctgggctcaagtaatcctcccatctcagcttcccaaagttttccaattacagtcatgagccactgtgccctgccctttaataattcttgcttgaaatagttaatactgtggtggttgctaggtgctaagtttctaactcaactcctccttctgtatttatttgttggaattcttagccagaatttagcttttgctgcccaggctggagtgcagtggtgcaatctccacccactacaatctccacctcccgagttcaagcgattctcctgccatagcctcccaagtagctgggattacaggcgtgagccaccatgcctgactaatttttgtatttttagtagagacggggtttcaccatgttggccaggctggtctcgatctcctgacctcaggtgatccgccctcctcagcctcccaaagtgctgggattacaggcgtgagccactgcgcccggcctgttggaattcttctgtgaggctctgcttccttttctcacacatttattgattcagtgttgattttagggattctgactttagtttatgggttataatttattacgagcagaatttattttcactgaaactgttctggttttgaagtgggaatcccttcaagctggctgctgtatcttttagacatttttttaaaagctcttcttactttcaggtacaataagacgttccagtctcctactgtcctttccctgcccagcccagcaatcagccacttctccaaggagccctggctcccctgagtggagaatcacatttagaaaccagcatctgagctctaagcgtgctgtctcataagctatgtttgggaaagtaggctttatcctgaagacagcaaagttttaactagaggagtgatataatcattatctgcatttttaaaaacttatttatttatttatttagagacggagtcgcccaggttggagtgcagtggcgcgatctcagctcactgcaacctccgcctcccaggttcaagcgattctcctgcctcagcctcctgagtagctgggattacaggcacccgccaccatgcccagctaattttgtgtatttttagtagaggtagggtttcaccatattggccaagctgatctcaaactcctgagctcaggtgatctgcccgccttggcctcccaaagtgctgggataacaggcgtgagccaccacgcctggtcattacctgcatttctaaaagatgactccagcagctaatgtggaaaatggattggagagcccagtgtttccagaaatacagcccttcaagatcagtcatttttcaacaacatggatgaccctggagaacattatgccaagtgagataagtcagtcacaggacaaataccacatgatctcccttctatgtggaatccaaaaggttgaacccatagcaacagagagtggaactgtggttacctgagactgggagatggggcgggttgaggagatgttggttaaagggtgcaaaatttcagttaggaggaataagttcaagaaatctattatacaacatggtgcctatagttaaaaacaatgttttgcattcttgaaaattactaagcgagtagatttttttttgttccctatatcttagtgctcagaagaaagcagattttaagtgttctcaccacacataagaaaatgacaagtacgtgcggtaatgcatacattaaatagcttgacatggtcatcccacaacgtccacatatatcaaaacataatggttgtaccccataaatatgcgcaatttttatttgtcaattaaaaataaataataaaaggaaattaaaattgtatttaaataaaattttattttattaaaaatatgaatatatggcacttcatgtcccatcttgacgaattttgccgtattggtgtctttactaggatattagacacaatattttttcctttaaaatcagtctctgtgatgaagggaatttaagaatcactatcatgaatggaaacactggtttcacttaccataagtggaaaataaaaatagacacaagagaaaaagctcacaaaaatgtgtgtgtgtgtatatatacacatttttaatatatatatacacattttatatatatatacacattatattagatatgtatatatatattagacagggtatcactccaatacccaggcaggagtgcagtggtaccatcatagctcactgcagcctcgacttcctgggatcaagcaatcctctcacctcagcttcccaaggagctgggaccacaggtgtgcaccaccacgctgggctgattcttttaaaattttttgtagagttaggctctcgctatgttgcccagactggtttcaaactcctgagctcatgcgatcctcccacctcagcctcccaaagtgctgggtttatagatatgaaccacctcacctagccaaaaatatcttttaatattgattatatactgctgccagccaaggttctgagcccaagacctcttttgattttgtggagttttttttaaattttgtttcattttgttttggttcacagaagatgttggcaataccgttaaagacgttcaaaccacaccaagacattatcctttatgaaacacaaaggttcaaaacatactgaaaaggggccgggcgcggtggctcatgactgtaatcccagcattttggaaggctgaggcaggcgggtcacctaaggtcaggagttggagatcagcctggccaacatggtgaaaccccgtctctaccaacaatacaaatattagccaggcgtggtggcgggcacttgtagtcccagctattcgggaggctgaggcaggagaattgcttaaacccgggaggcggaggtttcagtgagtggagattgtaccactacactccagcctgggtgacagagcgagactctgtctcaaaaaaagagaagagaggggagagggggaggggggaagggagagaagaggagaggagaggagaggagaggagaggagaggaggggaggggaggggaggagaggagaggagaggagaagagaagagaagagaagagaagagaagagaagagaagagaagagaagagaagagaagagaagagaagagaggaagaaactggaaagggtttctttgttcttttgtgatttgagcatgacttttttttttttttgagatggagttttgttcttgttgctcaggctagagtgcaatggtgcgacctctgctcaccacaacctccacctcctaggttcaagcaattcttctgcctcagcctcccgagtagctgggattacaggcatgcaccactaggctcagctcattttgtatttttagtagagacagtgtttctccgtgttggtcaggctggtctcaaattcccgacctcaggtgatccacccgcctcagcccccgaaagtattgggattacaggcatgagccaccacacccggcgattcaagcatgacttaacgccatctgtctggcatcttaatttaatcacttgagagcagccatggggataggtcacatcctggaaagaggtgcaaaggcaagttaataattcagtgagtcattcagtcccgaatgtgagcagagagagggggcaacgtggagggagctgcaggcagctcttgggaaggtgaagtccacaggacctgggatgggattggacgcttaggcgagcaggtgagcaggagggacttggacctgagtaacttggtaggtgagggtggcctttggaggcaggcagggcagggaatctgggtgggatcctgggaggtgtccatggtcatcctcggggtgcaatggtgggctggacccgggagaaggcaaatggtttggagaacaggctgaacaggttttttagtggaggaagacaatacgacttgggtagagcttgataaagacagaagggttagaagctcatttcttcgtgagcatgcgtgcagggaaaacaagccatgaggagttgacacaagtttcagtggctgctcagaacctctgccctccagaccccacggaatttccagagtggggcagtgcgtacatccctgtaatcgaggaaggccgcaggacagtggaggcgccatctccacacctaaaacacctaagtaatattggccagtttcacacattatcaaccctagtttttcttcttaacttgcttctccctaaactgaaaacagtgggggcagtgatttgcggggttttttgtttgttttgagacagagtctcactctgtcgcccaggctggagtgccgtggcgcaatctcggctcactgcaacctccatctcccaggttcaagcgattctcctgcctcagcctcctgagtaactgagaccacaggcacctgccaccacagccggctaatttttgtgtttttagtagagacagggtttcaccatgttggccaagctggtctctaactcctgacctcaggtgatctgcctgcctccgcctcccaatgtgctgggattacaggtgtgagccacggtgcccagcagttttttgtatattaccttttcttcttcagttcttatcatggtgtcaagcacacagaaagtgtccaaagatttagccaggcacagtggcacatgcctgtagtcccagctacttgggaggctgaggtgggaggatcacttgagctcgggaagcggaggctgcagtgatctgtgatagcaccactgcactccagcctaggtgacagagtgagactccatctcaattaaaaaaaaaaaaaaaaggaagtgtccaaagaagtcggtttgccagagtgatttgcctaacacattcaggcaaagtagtgagcattttgctttctgtttttgtctcactctgttatgggctgaattctttctcctcccaccccatcaatccataggttggcatcctaacccccagtacctcaggatgtatttggagatggggtctctacagaggtgatgaaggtaaaatgaggccactagcgtgggccctaatgcaagctgtctggtgtccttataagaagaggagatgaggacacagacacacacagaggggagaccttggaggacacggagggaagacggccgtctgccagccaaggggagaggccttgggggaagccagccccagatcttggacttccagcctccaaaactgtgggaaaatatatttcttttgtttaagccacatggatcgtggggctttgttaaggcagctgggcaaaccaatatccactctgtgtttatatcaatgtgtattttcatacaattatgtacagctacaaataggaatgcactcacgcatgtttattggggcatcagtaaagcaaggaggttggagtctatgtcttcaggaactaacgggaaccttacggctctactgtagggagggcccctggctggggtaggtgggtggagagtcacagctcctgtctccacagctttccctactcacatgggcagcttttcaccttctctccccagatatgatttccatggctacagggcgatgctcaaatgagtcctcttgaagaagcaaggacaaacagcttaacaaatctcaccactgtactccagcctgggcaacagagcgagactctgtctcaaaacaaaaagcaaaggagccagcccggggatggggaggacgggggcagggcggcctcctatcccccgcttccattaatagactccctcttaccttttctttcttcagtagagacagggactcactgtgttgcccagccttgtctcaaactcctgggctcaagtgatcctcctgcctccacctcccaaagtgctgggatgacaggtgcgagccatggcacctggccctttgtgtcttgtatccaactaaaatgcatcctcagatagggtctttgcagaagagtgaaggttgtctgggtagggcctctagaaatcacccacatctggcaagggcatgacctgttctctccctgcggatgcactcattccctgaatcccgggtccaagattccctccaaagaattccaggctctgggattaaatctatgaaccatctcttaccctccaacgaaatggggtcagcacaccacacattcatcagtcaaataattatgagtgtctgtatttccctagcaagaattattgtttttgtatctttcgttttttgtttgtttgtttgtttcgagatggagtctcgctctgtcacccaggctggagtgcagtggcacgatctcagctcactgcaacctccgcctcccgggttcaagcgattctcattcctcagcctcccaagtagctgggattacccgcatgcgccaacacgcccagctaatttttgtatttttaatggagacggggtttcaccatgttggccagactggtcttgagctcctgacctcaggtgatccacctgccttggcctcccaaagtgctgggattataggcatgagccaccatgccggccaagaattctttactgggcactaaatatatgccagagacttggtggataaattcttatggaggtaagggtctggtgagggagagagatgataaaaaagtaagtgacaaggaaagaagttatctttctgaataagtcagataaaagcagtgtttaagtcaatcaaaacggaggccaggcctggagaatccctgtgcagaccacaccagcctcttgagtcacctcaaccctgctcgatttgcatacataagtgaaacttaacttgagctatttcttgcaaaggcgtacgttaaagaaaaacagtttgagctcactggaggtttaaactcttggactcaggtgatcctcctgcctcggtctcccaaaacactgggattacaagtgtgtgccaccatacccagcctccagtgaccatttacaaatttacaactcggtggcattgagtacattcacagtgctgtgcagccgtcaccaccatttagttccaaagcattttcagcacctcatgttagtctattcaggctgttacaagaaaattccaggctgggagcggtggtttaagcctataatcccagcactttgggaggccaaggtcagaggatcctttgagcccaggagaccagcctaggcaacacggggagaccctatctttaaaaaattttttaaaaaattatctggccatggtggcacacacctgtagtcccagctacccaggaggctgaggcaggaggaacgcttgggcccaggaagttgaggctgcatggagccattattgcattaccgcactccagcccgggcaacagcaacacccagagcaagcaagcaagcaagcaaagaaggaaggaaagaaggagggaaggaaggaaggaaaaatataccatagactgggtggtttataaacaacagacattggccgggcgcggtagagcacgcctgtaatcccagcactctgggaggccaaggcaggtagatcaactaaggtcaggagtttgagaccagcctgactaacacggtgaaaccccatcttaactaaaaaaaacaaaaattcgctgggcatggtggcaggcacctgtaatgccagctactcgggaggctgaggcaggagaatcgcttgaacctgggaggcagagattgcagtgagctgagattgtgccactgcactccagcctgggcaacagagcgagactccgtctcataaataaataaataaataaataaataaataaataaataaataaataaaattgttagggaaacaggagcacaggagagccagactgacaccatttttaaatcaaccccaccttaaaactagcaggggaccttccttgccagtcatgagccgtggtcctcagatgtttacagctaagggagcagctagcggcttaataatgcctgcaaggacaaacgtctaccacaacaaaatgtccagatgtcctgatatcacataacagtatttgctttaaaatgattaaatgctgagacctgggctttaaaaaaaaaagatgattatagttatgttttgatgtgctttcacactaaaatgccaaggatatcttcctttaaatcaagaaagtatttaataatacattttgtccggctgtcagcccacctgcctgcagacatagcttagcttttagacaaggctgctacatcagaagagtttaaaacaaagacagcgagttccttctcctgttttctgaggacgccctgccgtgtaactgagcagctttcaataaacaatctctgctcactgcactctgagattcaccttgaactttcccaccacagatccacgaacactttcttggggtctggatcaagacccctttctctggcaacaaaatcacacagtgtgtactccgttgagcccaggcgccttgagctcacaatcatgtttgtgaaatcgatgcatgtggccgggcgcggcggctcacgcctgtcatcccagcagtttgggaggccgaggcgggcggatcacctgaggtcgggagttcgagaccagcctgaccaatatggagaaaccccgtctctattaaaaatacaaaattagccaggcatggtggcgggcgcctgtaatcccagctactccggagactgagacgggagaatcgattgaacctgggaggcggaggttgtggtgagcctagattgtgccattgcactccagcctgggcaataagagcaaaactccatctcaaaaaaaaagaaaagaaaagaaaaagaaattgacgcatgcgattgtgtgtgactgtggggttgttccacgtcgttgggaccgtttgattcattgtgtatctttccccggcatgaatgtattttccatgtatttatctgctctacgtcacagatactcttttgaggactagtgatctcaaatccacagtgttgattctttacattttatacacctgtgtcacgaccagcggataaggatacagaacatcccagcaccccaccaatttccacccacctctccccgtgctgtagccctttgctccctcagcaccagatgcaacgtctttctgatttctgtcgtcactgattgctttgcctgttctaggacttcctctaagtggaaacatacgctatacatacactatacgtacttttgtgtctggcttcatctgctccacgtggggtctgtgaggttcagccctgtggttggctgcagccatgcatccttccttcgcaacgccctgtagaatctcatgggatggacacgctacgcatttgcatatccatcctactgtgcctagtcctgtgagtactttccaaatctgctgagtgctccttttccaacaaatattttgttcggacccttttgaccttcctgaagtgaaattcatagatatgaaaatgttctgaaattttggccgggcgcagtggctcacgcctgtcatcccagcactttgggaagccaaggcgggtggatcacgaggtcaggaattcgagaccagcctggacacatggcaaatccctgtctctactaaaaatacgaaaattagctgggtgtggtggtacacacctgtaatcccagctacttgggagattgaggcaggagaatcgcttgagcccagggagcagaggtcacagtgagccgagatcatgccactccgtcttaaaaaacaaaaatggccaggtacagtggctcacgcctgtaatcccagcactttgggaggccaaggtggatggacctgaggtcaggacttcaagaccagcctgtccaacatggtgaaaccctgtctctactaataatacaaaaattagccaggcatggtgacacatgcctataatccgcctactcgggaggatgaggcaggagaattgctggaacctgagaggcggaggttacagtgagctgagatggcgccactgcactccaacctgggcaacacagcgaaactctgtctcaaaaaaaaaaaaaaaaagatgttctgtaaacataatgtaaaaacttacctgtaatttaaatcagaaataagggagacatactctattataaaacaatatgtaatttagtcaataaatgctcagttatgatcactgtagaagatatgatgaagccaggcacagtggctcacaccaattatcccaggactttaggaggctgaggcggaaggattgcttgagaccaggagttaagaccagcctgagcaacagagcaagaccccatctatacactaaatatttttaaaatattagccaggtgtggtgatgcacacctgtagtcccagctactctggaagctgaaacaggaggatcacttgagcccaggaggatgaggctgcagtgagccatgatcgcaccactacactccagcctggatggcagagcaagatcttgtctcaaaaaaaataaaaataaaaaagatacaatgaagcaattagatgatgcttccatcagtggtaatgaattgttggctattatttgcatgtgtgtaaatctctgtatatatgtgagaataaatccatatatatttatgtgtgatacatatgtatgcattcttgtgagtgtataagaatatatttgcacagtccaggagcagtggctcatgcctgtaatcccagcactttgggagactgaggcaggaggatcccttgagcccaggagtttgaaagaccttgtctctatcctaaaagataaaaaagaagatattcagccgggcacggtggctctcacctgtaatcccagcactttgggaggccgaggcgggtggatcatctgaggtcaggagtttgagaccagcctgggtaacatggggaaaccccatctctactaaaaatacaaaattggccaggtggtgggcatctgtaatcccagctactcaggaggctgaggcaggagaatcgcttgaacccaggaggcggaggttgcagtgagccgagattgcaccacttcactccagcctgggcaacagagcaagactccatctaaaataaataaatcgcgtccttttagggaataccagggggatgtatcccaagggtggaagccctgctgaggttttccagggtggtaggaggtgggtcggagtctctgcagtgccccaggctgtgaagcttgacttcaggtgtccaccagagtgtcctgttcttttgtcaaacaccagcctcggtgtcactgggaaggtatttttcagatgagattcacatttacgatcacttcaatcaagtaaatcaagtaagagagtgtgccctccacaatgtggtgggcctcattccgtcagctgaaggttgaaagagcaaaaactgtggtttcctggaaagaaagaaattctgcctgaaggctgtagtcacatagaaatcctgattgaacttctagcctgccagcctgctctacagatgttggacttaccagccccacaatcacaggagccaatttcttaaaatacatgttgatagatggatagatggataattatctttctatagatatagagatatagagacatgtacatttccttctccaagggagaccaacatccttggagaggctctctctctctctctctctctctgtctctctgtctctccaggtcaccattaatatagacagaaaacctattcagaaagagagataagtatgtagaccatattttttgagccctgtctctctgagagagagagagagaacctattggttctgtttctctggagaaccctgactgattacagaggcctaagttaacagtgatctggtctagggcagataaatacaaatatgtgcacgatatttttgagaaatatgtaggcaacaggggaagataaagttgactccacgggacttgcagagaggggagtacgtgaggagttactcgtaggtttttgtcttcagaactagacggaccttgacagcatttgctgagacaggcaagccttaaaggcaagagagagaaatggaggtggttcctgtaaaaccatctgcagggtatgtgatgggggcactgggaaaggagaaggaacaggagaggaattggtaagaggcgacgtgaaaagaataaaagtacagagaacttgtgctcaaggagaaagagcagctgggatgtttaccatctctccagcggccagatgaaacctcagctctcaagtccgcaacggaattttccaccaagctaaaggccaggaggaattccaagaattatatacatcaccgtgtaattaaggatgggaagatttttctcttagacactaaacaatgtggacagtgttgcagagacgtctgtttaaaatcacatttctctaaatagccatctgtttcacagattattcctggattcagtcctccacaattttcattcaaattttgagagctgacaacatttaattttataatctgcaggttttgtgtctttacaagtttttagcgtagtgtctggcacacaataagggctcagtggaattattgtgaaatcatatttcctgacatagtcaataaaggaacaaaacattccacattacctaattcgtactctcttctttaaaaatttagagatgtattataattatataaattaaatttataaatgtataatttataatttatttatatattatacatttataaattatatattatgtaacatatattaaacataaaaaaattaaatacattatatataaagatgtactgggcttggtggctcatgcctgtaatcccagcactttgggaggctcaggaggttggatcgcttcagcccaggagtttgagaccagcctgggaaacatagcaagatcccatctctacaaaaaatacaaaaattagccaggcgtggtggcacacacctgtagtctcatcttatctactcagggggctgaggtgagaggatcgcttgagcctgcgaggtggaggttgcagtgagccgtgatcgcaccactgcactccagcctggatgacagagtgagacgctgtctcaaaaaaaaaaaaagccatattgataaaattataccaagatatatttaaatacagaattaactgtgtatctatactttatatacatgtatgaatatatttgaacattaaattataattatgaacataaatttgcatcatatattctacttatgtctccctgggcacatgtctgtatgtgtatctgtggacacacgtccatgaagaaattggatgggatgaactcgggagtaagttaactctgtctgcgtcctgtgcacctgatgcagcaataaatactccatcaaaggcattgcatttcccaaaagcccgtgaggcaggcgtgattctagtgtccattttacagagaagagtactgaggtgtggagagactaagtcggccagcagtgaacaccctcagccactgctcggacagctctcgctcacctccctgcatctccggctccagacgccatggtctccatcactctccctcactcgggatctcatgccggctcccggcttggatcacagacgctgatggctcaaaaacgtgtgtctgggttagagaatccacctgtctcccttagctctgcactggggttgcccaatttaataaataaaaatacaaattgcctggttaaatatggatttcagataaacaataaaaaagaatcaacttttattttagaatcgacttagatttggcgaaaagttgcaaagagaatagaaagttttccttgttcctgcacccagcttcccctgttagtagcgtcttacacgagtatgatttatctcaatattagtgaactggccaggcacggtggctaacacctgtaataccagcacttttggaggctgaggcaggtggatcacttgaggtcaggagttcgagaccagcctggccaacatggtgaaaccccatctctactaaaaaatacaaaaattagccaggcgtggtggtgagcacctgtagtcacagctactcaggagactgaggcatgataattgcttgaacccaagaggcagaggttgcagtgagccaagattttgccactgcactccagactcggcaacgagtgagaccctgactctaaaaaaccgtaaaaataaaaataaataaataattgccaagtgtggtggctcatgcctatctataatcccagcattttgggaggcagaggtgagcagatcacttgagcccaggagttcaagaccagcctgggcatcatggcaaaaacccttctctacaaaaaatacaaaaattagctgggtgtggtggtgcaggcctgtagtcccagctactcgggaggctgaggcaggaggattgctcaagctggggaggctgcagtgagccaagacagcgccactgtactccagcctgagccacagagtgagaccctgtctcaatagaaaaacaaatacataataaatacataaaacgcccatggcagggacacacacgctggtttgggttggagccagcccgtaaacccaaatttgggggcccgggctctcggctgctgcagcactgactaccgttaaggtacaataaaactgacacatgggcagtgaggggaatttgctctcctgcctccctccctaagttcatctgctgagaaaaatgctttgagataaacctggagccacagctctctgcacagtcagatcgcaggaacgcggcctagctgcttcagccacgttctcgcggcgccacctggtggccatggaccgccatcgccgctggacgtcagggccgccaggcccagcgagatgtcacctcctctgaggagccttccaggatcgcacccggcacgcgctccacgcctcgttgtctgttcttcggagcaccgaccatgatcacaaatcagctcgctcgctgtgtttcctgccgggtcgctaccgccatgatccgcacgtagtggtcaaggctgaggttgtatgaatgtggacgttataaccctggctccctctccctccctatgctgggctcccctcgatccccaggcggtggggtgcccctggtttttcctttttaaaattataagtctggccggacgcggtggctcaggaccgtaatcccagcactttgggaagtcgagggagggtgtatcacttgaggccaggagttcaagaccagcctggccaacatggtgaaacaccatctctactaaaaatacaaaaatttgccgggcatggtggtgtgcgcctgtaaccccagctacttgggaggctgaggcaggagaatcgcttgaacctgggaagcagaggttgcagtgagccgagatctccagcctgggtggcagagtgagccttcgtctcaaaaaataaaaaataaaaaaaaggttaaatcaatttaaatgtcaatgtccacaggagctacagatggtaccaatagctcccagctggggctcgtgtatcattggtcagggcttcatcaggattggctactgccccacccttgttaaacatttttaatatcttccttgtctaccagggtcaggcacctcaggtagatgaatgaaggatgggggggatgggggagggagatggaagagggaagggaagcagagggaggaggagtgagtgggcagccctgatcggaggtccctccccatcccatctaaaggggctccctggccgggcgcagtggctcacacctgccatcccagcactttgggaggctgaggcgggtggatcacctgaggtcaggagttcaagaccatcctggccaacatggtgaaaccccgtctctactaaaaatacaaaaagtagccgggtgtagtggttcatgcctgtaatcccagctactctggaggctgaggctggagagtcgcttgaacctgggaggcggaggttgcggtgagccaagatcgccccactgcactccagcctgggcgacagagcgagattccgtctcaaaaaaataaaaaattaataaaataaaaataaataaataaataaataaaggggctccctgctcttctgctccaacctgtggctgccgcataggaacatgggtcacaaaacccagaaatctggattcctttaagtgaaatcttccaaattttatgtttaagaaggtcatgtatttattccttcctaaagaccatgctgaccaaatcaaatgagtctgtggataagtgtgtccaggcttcagactactcccttttggagcctgtggtgtaaagggaacagcttaaagtccctcgccccagtcaacaggggaatttaatgtcttgggttccctggcagaacttttctgttttttttttttttctctttatctaacacttccatgtgtcttactgaaagccagctgcagagttagagcagcgtttggcagaatcaaatatggactagcgcttgcttctgtacggccctcaggttaagcatggattttatatgttcaaattgttgaaaataaatcaggccaggcacagtggctcacacctgtaatcctaactctttgggaggtcgaggcaggagaatcgtttgagcccaggagttcaagaccagcctaggcaacatagtgagaccccccacatctctacaaaaagttaaaaaattggccgggtgcggtggcttaggcgtgtaatcccagcactttgggaggccggggtgggcggatcacctgaggtcaggagttcaagaccagcctggccaacatgatgaaaccccgtctctactaaaaatacaaaagttagctgggcgtggtggtgaatgcctataatcccagctactttcgggaggctgaggcaggagaatagcttgaactcgggaggcagagtttgcagtgagccaagatggcgccattgcactccagcccgggcaacaagagcaaaactatgtcttaaaaaaaaaaaaagttaaaaaattaactgggtgtgttggcacttacctatggtcccagctactcaggaagctgaggtgagagggtcatttaagcccaggagatcaaggcttcagtgagctatggttgcaccactgcattccagcctgggtgacagaacaagaccctttctttattcaaaaaagagagaaaagaaaaaagagagagaaagagaacagaaaaaagaagagaaacaaagaaaagaaaatgatatttcataatatgtgcaaattatatgaaattcaaatcttggcttccataaacaaagctgtgttggcccatggtcacgccttcattgacatcacctggtggcagctttgtgttacatcagcagagttaagtagactgtgtggcctgcaaagcctcaaatacttgctgttctgggccaggcgcggtggctcacacctgtaatcccagcactttgggaggccaaggtgggcggatcacccgaggtcaggggttcgagaccagcccagccaacatgctgaaaccctgtctctactaaaaatacaaaaaaaaaaattagctgggtatgctggcaggtgcctataatcccagctactcaggaggctgaggcaagagaatcacttgaacctgggaggtggaggttgcagtgagccgagatcacaccactgcactccagtctgggcaacagagcgagactccatctaaaaaagaacaaaaaaaattgctattctggccctttcctgggggcatttagagaaaatatttacccacccttctaggtactttgcgtgcattaacttatttcatcctcacagagcatctatgatgaaggcgctgctattatcccatttcaaaggtgagaaaagtgagtacgaaaggtgaagtccatggagacacagctgtgtgaggcagagccaggatttaggctcaggaagcctgaacctagattctagggtgttaactgctacatgaggctgcctctctttctaagcattttcacttgtgtttctctccacatgctatgttctaccataaattggcttccttgaatgggagggccacactgaatcccactgtctctacaactgtgacatcatgtaatgctgactcctttagctttattaaactcaggttctaaccttagccacaggctctccttctgccaagctgtcagctaaatcaaaccatgctctcttatccccagcctgctcctgccttcatctccctcgttttctttttaaagattaattatttttaggctgggcacagtggcttacgcctgcaatcccaacactttgggaggccaaggcaggcagatcacctgaggtcaggagttcgagaccagcttggccaatgtggtgaaaccgcatctctactaaaaatacaaaaattagccgggcatgcggacaggtgcctgtaatcccagctactcgggaggctgaggcaagagaatcgcttgaactgaggaggtggaggttgcggtgagccgaattcatgccattgcactccagcgcctgggtgacaagaatgagactccatctcaaaaaaaaaaaacctgtcatattggattagggtctaccctaatgaccttgtcttgccttaattactcgtctaaagaccctattaccaaatacagtcacatttctaggtgctgggagttaagacttcaacatgcatttggggggacaaaattgagcctataacaagctaattacttaatgttttctgggagatgcctcaacctgtcccaaacgaagcttatgacatcttcccctcacctgctcaccttccagagttgcccatctccaccaatggcaccattatccacctggttacactgaccagaagccaatggcgcccttctcattacccctctcatcggtcaccacgtcctgccgtttgacgctgatcaacctgctcatttccccccatctcctctgccgccactgaaaaccaacccaccaccgtcatctcctgcactgcggaaagttctaaatatccccatcccggacccaaactgcctctcctcacccaggaatcatttgatgtggtcagagcgagattcaaactcctcccaactcctgaaactgtcaaagctggacttgaatacggagcagagccggcgtcctgttggagtgcttgtgagctcaccagtgctccctccctccaccgtcactctaaatcaggactacccagcctggcaccctcagcatttggggttggaggattctttgctgttgggggtgggggaaggggttctgtcctgtgcattgtaggatcttaagcggcatctctggtctcaccaactagaggccaggagcagcccctcacccagctgtgaccatcaaaaatgcctccagacactgccaaaggtccaccggttcggggaagaaccacctctgattgagaccccttccaccatcccgctctaaataataatgatttctcccattatgcagagaaatactaaagtcatccacatagggaggtgagtttaaaagcccatcaggacatgtgcattttactaagccattaatgtccctgcgatttatgagagaacagtaactgcattccggaagacacaaatggctccttccacgatttcattatctgccttgcatgagtgagcctgagtttctgtagcagttgccacgtgctgccactaggtggtggtggaagccaagtcataaagtagtttggggcccttttctgttgctttggttttggggggtttggttttgttttgttttgttttgttttgtttttcgttttgagttttgctgtagccaggctggagagcagtggcacgatctcggctcactgcaacctccacctcccaggttcaagcgattttcctgcctcagcctcccgagtagctgggattacaggcgacttcaccatgcccagctaatttttgtatttttagtagagacggagtttcaccatgttcgaggccaggctggtctcgagctcctgatctcaggtgatccgcccagctgggcctcccaaagtgctgggattatgggcatgaaccactgtgcccggcctttttcggtttttagatctttattttaaaattgacaagcaaaaattgtatatatttatagcatgcaacatgatgtttccatattcttatacattgtggaatggctaaatgtagctacgtaattttctttttttctttttttttttttaagacggagtctcgctctgtcgcccaggctggagtgcagtggcgcgatctcggctcactgcaagctctgcctcccgggttcacgccattctcctgccgcagcctcccgagtagctggggctacagatgcctgccaccacgcccggctaattttttgtatttttagtaaagacgggttttcaccgtgttagccaggctggtctcgaactcctgacctcgtgatccgcccgcctcggcctcccaaagtgctgggattataggcgtgagccaccgcgcccggccctgattttctacatagctttttttttttttcttttgtggtgagaacataaaatctactctgagcaattttcaaagacactttattttttattttatcttttctctcaaattcgtcgctagtattacttgagtagtttctaatacagtcatgtgcctcatagccacgttttggtcaacaacgagccacatacgtgatggtgggcccgtcagatcataatggagctggaaaagccctaccgcccagtgatgcggtagccaaagtaacatcgtagcacaagtactgtacttttaaaatataacttcagtgtagcctaagcttagagtgttataaagtctacagcaatgtcccaggctttcacattcactcactcacaccacccagagcaacttcccatcctgcaagctgcattcatggtaagtgcactatgcaggtggaccatttttttaatccttcataccacatggttactgtacttttttttttcttttcttttttttgagacaggatctcactctgtcccccaggctggagtgcagtgacacgatcacagcttactgaagcctcgacctctcgggctcaatcgatcctcccacctcagcctcctgagtaagtagctgggactacaggcatgcaccaccatgccaggctaatgttggcggggggcgggggatgctgggggggtggggtgtgtgtgcagagatggggtttctccacgcccccaggctggtctgcagctcctgggctcaaggaatctcttcacctcagcttcccaaagtgctaggattacaggtgtgagccatggcgccccgcattactacacctttctcaggtttaggtccacaaatactttcctttgtgttacaaccgcctgcagtactcagtacagtagcctcctgcacaggtgcgaggctaggagcagcaggctattcatgtagctcaggtgtgcagcaggctgccccatctgggttgctgtgagtcactctagaacattctcacaatgaggagatcgcctaaggatgcgtttctcatactgtgtccccttcgtccatcgaggcgtgactgtacctggggcctcagagcacctgcagtccccccaagggccaccttcctgagaccacagtctgggcagccggcctccctgcatcccggagcgcactggggatgaggactcacccaggagagcccgagacacctgagcggccggcacaaaggccctagggaagtgtgggggtacccttggtctcaaagcgctgatccgcctgtgccccctgacctgccagggccggcccccgcttgggtcttggagggcgctgcgcaagcctgcgccccgcactcgcccgggaagggaagggcagggaaggggcgcgcacagcctggcacctgctgtgcaccaggggagacgcgcggcgctccaggtggagtcggcggcggccgagctgcgcggggctgtgcggggctggattctagcctgcaggacgcgaaaacggcctgggtccggcttcctcctcccctgaagcagcgaaggggcgtcactggcgcgctgttaaacgtcttcgccatcggttccctgcatcctccctcctgcctgggtagccagctcctgggcgcgcccaggcgcacacgcttccctcgctcctcctgcagccacaacgcccccaccccccccgcccgcccgccttgtgcggcagcggtgaccgccttctcctgctgccaccccctccaccccctgttcaaggtctgtcaccgtagggggcgggggggcgcgtggagccgctgggggttcggcccaccccgcgaaccgagctcccggccctgtgcgccctcagctctgccgcgggcgttggcctgggcgggcgcaggactgcctggtcgccctggagctcagggtcggggccccgcgtttaaccaccaggcggaggcgcaggcggagcccggagaggacgcgacccctctgggcggccttgggcccctggacgtgccagactctggacccctgcgggggctgccgtggagagcagaggcaccgcgtcctgcccagagctccgataggcgggccgcgttgggggattgtgggggccggcgcgcaggggaaccgtccactcccagggtggcaccaggatgtgactatttccatacccaaatgagggttggatttccatctcctaatatttccacagtttgggggtttcctcaccaacttgtctgacatttctcggccttccttagtgatgacaacactaccgttggttaattttcttcaaaatgtgtgcaaaccacttcatgtatctgtagttaaaatatggaaaggagacatttaatttcttctctttttatttatttattttgattttttaattatttatttatttatttatttattgagacggagtctcgctctatcgcccaggctggagtgcagtggcgcgatcttggctcactgcaagctccacctcccaagttcatgccattctcctgcctcagcctcccaagtagctgggactacaggcgcccgccaccacgcccggctaatttttttgcatttttagtagagatggggtttcaccttgttagccaggatggtctcgatctcctgacctcgtgatccacccacctcggcctcccaatgtgctgggattacagccgtgaaccattgtgcccggccaagacatttaatttctatagcattttatgaagaccagttgctgctgaaatagtctgcctccccacacgcccctcatcatgtttataatgttttcacaaggctcttttctccagatcattttcaacttatttctaacatattatgtgaactcgacacaatatttattttgtttcctccaataatgtagagaccatactttttggttatactcattcctaagcactttacattttattaaactatttgcatggaataatttcccatttcattctaattgtagttattctggaatattatttatttaagtgttattgattaaaatatattcctgtgtgcttggtcatattactaaatttatgacttttcaattattatttcttgtttctttttggttttctaagcagtcatttcttctgtaaatattatgacatatctttcttcctgtccactaggtatactggactttctagtgatatgaaccaataaactttctattgtggcttatatcagtttgtgtgttctgtcatttccaacacaaagaatcttaaccgatacagatttagaagagaaaaagtttcaggcctgtaatcccagcactttgggaggctaaggtgggaagatcacttgagcccaggaatccaagaccagcctggacaacacagtgagaccctgtctctataaaataaaataaaataaaaattagccaggtgtgggtgtgcgcctgtagtaccagctgcttgggagactgtagtgagaggctcgcttgagcccaggagttcagggctgcagtgagcatgattgcactactgcccaccagcctgggtgacagagtgagaccctgtctcaaaaaaaaaagcaagttttagaagcattcttgctaaagaaattgtccctagaaaagtatttattcactaaaatgaacgacttttacttacttttacaattttttataagtcagagtaaaatttaaacacatcgatatagttcatgaaatgattcccctgaacctgacatatactagctttcttcttagagcctcagtgcctaggcagaaacttggcagttcctgagatgacactgtagatatagggagggaaaaagaagaggaaagcaaagcagatgagacagaaaagataacttagtaaggaagttctgtgaccataaaatagtgttcattgttctgaacatcattcaaaaaaaacaatactcactttgggaggctgaggcgggtggtcaggagttcaagactagcctgatcaacaagatgaaactccgtctctactaagaatacaaaaattagccaggcttggtggtgtaatcccagccagcctgtaatcccagctacttgggaggccgagacaggagaatcgcttcaactcaagaggcggaggttgcagtgagccgagatcacaccactgcactccagcctgagcaacagagggacactccgtctcaataaataaataaataaataaataaataaataaataaataaaatgtaaaaggaagattaaaaattcctcttgtgctggaataaaatgatatagatacagaagatgacaactctgaaggataagacctgtgacccataaaataacttttattttatggtcatttcaacttatgaccccaaacatcatttaaaataaatatttagaacatgaaaacaattaactttttaatgaatgaaatgttcttgagaaaactgatcagagccagtgtagtatgcatcggtgcttcatcgtgatctatgcttatgaagattcagttctgcttttacataatatcaagcgacattgtagtaagaaaacaattaacattttagtttgtattggattaggcatttttaaaatgagatactcacacaactgctaacaggaatgcaaaacatctccatttctccactgaatcacctttacatgtaatgttctaaataaataataataaaaatatacacatttccttctgatttcttaaaaatcaacgtaagtattcattggccaggtgtggtggctcatgcctgtaaccccagcactttggaaggccaaggcaggaggatggcttgagcccaggagcttgaaaccagcctgagcaacatagagagaccctgtctttaaaaaaaaatttttaataaaaataaaggtagatactcatctaactgctagaaaaaactaaaaagatgtcataattgaccttatataagttgtatacaatatgagatacactatttaactgcatatattattttggcgggtttttttttgttttttcttacttttttatgtttaaacttttatattatacaaaacacagccctaacataagttttttctcatcttttttttttttgagacagtcttgctgtgccacccaggctggagtgcagtgctatgatcatggctcactgcaacctccacctcccaggctcacgtgagcctcccacctcagcctcccaagtagctgggaccacaggcacatgccaccatgcctggctaatttttttgtattttttgtggagatgggattttgctatgttgtccaggctggtcttgaattcctgggatcaagtgattggcccaccacagcctcccaaagtgcagggattacaggtgtgagccactgcacccagccagttttttccataaacctttaataataggcttttaggtctagaaagtaatttctaatataacagagtttgaaaatgtataagttccattaaattaaatttaatttaatttaattaattaaatttaatttaaatttaattaattaaattaatttaaatttaattaattaaattaatttaaatttaattaattaaattaatttaaatttaattaatttatttaatttaaattaattaattaaattaatttatttaatttaattaattaattaatttaatttaatttaattccaattaattaaattaattaattaaattaatttaaatttaattaattaaattaatttgaatttaattaattaaattaattaaattcaaattaatttaattaatttaatttaattaatttaattccaattaattaaattaatttaaatttaatttaattccaattaattaaattaatttaaatttaatttaattccattaaattactaacatataggctgggtgtggtggctcacatctgtaatcccagcactttgggaggccaaggcaggaggatcacctgagatcaggtgttcaagaccagcctggacaacacggcaaaacgctgtctctactaaaaatacaaaaattaggtggacatggtggcaggcacctgtaatctagccacctgggaggctgaggcaggagaattgcttgaaccggggaggcataggttgcgtcgcagtgagttgatatcgtgccattgcactccagcctgggcgacaagagagagactccatctcaaaaaaaaaattactaacatataatatgaactctttagtttctaataaatattgagctaattttgaaggcttgactcacaaaattttttgcctatatgagttcttgcacgttcactaagggatgaaatgtgagcaaaggcttttccacgcttattaaatatatagggcttctcttcagtatgagttctctcaaatagagtaatggctaaactattttggaaggcttcctcacatgcattagagacataaccatttctctccactatggatttcctggtgttgaataatgtcagtcatgcaacagaatgcttttccacatgtattatgtttgtggggatgtctcttcagtgtgagctctagtatgttgccttaaggaggaaaactcactaaaagccttcctacattcagtactttcataggattttcccctagtgtcagttttttgatgtaggatgagctgggaggtcttgtttcttgttgctttatcacattttttacaatcacaggttttctttcctacatcagttctgccatgctgcaaggaagctgagctgcatttgacggcttctccccattgcttgccttcacagggcttctctcctgggtgagttctcatatgtcgaaaaagagatgaactatcaataaagcctttcctacattgactataatcataaagtttctctccaatgtgaattttccagtgtataataaggtgtgcttttctgctacaggctttcaggcagagagtgcattcttaggattcctcacctgtatagaatcttatgtgtctagcataggatgggcaatcagtaaagcgttcctcacactcattgcatccacagcatttgtctttagtgcatattctttgatgtccaattaggtataaattctgcctgaatacctcctcacattcactacattctgacttgtatgaattttctcatgctttatttaagatgaattataactgaatgatttttcatctccattaaatccataaaggttatttcttctataattaagtaaatcaaaattatgcttcaagccccctccacttaacacatgctcatggagtttttgtcttgaggggatactgtttacaaaagcctcacgttcacagactttctgctcagtacatgttttctcatagatgaaattaatttgatttggaagtctctccttgaccaggcatggtggctcacgcctgtgatcccaaccctttgggaggccaaggcaggtggatcacttgaggtcaggaatttgagactagcctggccaacatggtgaaactccatctctactgaaaatacaaaattagccaggcatggtggtgcatgcctgtaatcccagctacttgggaggctgaggcaggagaatcgcttgaacccaggaggcagaggttgcagtgagccgagatcacaccattgcactccagcttgggcaacaagagaaaaaccccttctcaaaaaaaaaaagaaagaaaaagaaaagtcgctcttcattttcttggtgcatctctatttggttaccagcttcctagtcatttcctaaaagggaagagagaatttatcacttgtgaatcttcccattatcacactgtggaattaaacttctttacacataccccttggtgggtatatactcttattttgtcccatacatcatattttttttacttattggtttttacatctgactttcattaactgcgggcactttagagaccaggatcttagctctagacttcagggttttttttcttacttctgttttcctttgctgacaaccacgtacaataacttcgctcttcagcacaaacctacaatttctctagcccacaaaagcacagcaaatatgaaagatgaagtaaatgccagcttggcacccaatctcatgtcacttggatccacaccatgcacttaataatacacttttttttttgagacaaggtctggctgtatcactcaggctgattgcagtggcacaatcgtggctcactacaacctctgcctcctgggcttaagtaaccatcctcccacctcagcttcccaagtagctgagatgacaggcacgtgtcaccatgcttggccaaggtatttccaacaaataaccttctgctccattcaaaccagggtgccaggctcctcagcttgcagacggcctatagtggaaactcaccttgtatgcgtgtgagtcaatgccccttaataaactcccttttatatatacatctaccatattagttatgtccctctagagaaccctaatacacaggcaaatgatggagctcttggtcttgttcagattcagttccataaacaatatttcagactctatgagtgaaacatgcacagtgccaacccctcactgatcatcagggatgtgtgaccttcttgtgccctgtttgccagatgctcaggggctcacctggactaccctgatatggggttcctgtccccaacatccatggttcttctccccactctaaatgaaagatcacatatgtgccaggtacagtggctcacgcttgtaatccctacactttgggaggccaaggcgggcagatcacctgaggtcgggagttcaagaccagcctgaccaacatggagaaaccccatctctactaaaaatacaaagttagccaggcgtggtggtgcatgcctgtgatcccagctacttgggaggctgaggcagaagaaagaagaagtgcttgaacccgggaggcggaggttgtggtgagccgaggtcatgccattgcactccagcctgggcaacaagagcaaaactccatctcaaaaaaaaaaaaaaaaaaaaaaaaaaaagatcacacctgacatgggaacaggacaccatttttatgggaaatgctggggtctgggggttacaaactggagacaaagaccaaatttctattaacagtagtcctcctgctgtacattagatctctagatttattcatcctacgtaactgcacttctgtaccatttgaccacatctccccgcttcctcctcctccccacccaggtaaccaccattctgtatttgatgttgttgttttttaatttcacatatattcagacaaatttgagtttaaaaaatttttttaattttcacatgtaagtgaaatcatgcaatatttttatttctgtatctggcttatgtcacttatcatcccttagtataatttgagtttcataggctctcacctcattaaaatggcactacagaatcttgtcaaataaatatatctttcaggcactggaaaagtctcagaaagaaaagatatcctctctcctctttagctatagttcaataatacgatttaaataatccgatctgataaggtatccaatgaagaacatttatgggaccataaacttgttcttctctccaaaattcagtgaatatttgtaattgttagcaatctgttatgctctccactaatataaaccaactcttaaaagttattggaacaaaagaaccctgaaaagcactcagtctccagaaattgttgcattaatcattctcattaggtgccttactcaacaatttgttgcctgagttataatcacatccttgaatttccaacatattaacactttaaatatttctttatctcatcacaagatcagcactttcctctcctctgagaagtatgaggtagcaatgtcactgatttttattaaatgttttggagtcttgactcacttaaatgcatattatgtgccaaaatgtgacaggaaattaaatgagatgccaggcatttcagaggaaataaagaaaagaaaatcaagtttaacaaaaggaagaagggtgtccaatagtcatccttaaagaaagcacatttacttatgtatatctaaaggtgtaagggcatggggctgagagccaggttgacaaaggctagaggacagagaatcagagaaatcatccaaaaaagacgagcaagatgatccaaaggacagcgggctggccaccacatcttctaaagcccaaggcaagaatgaccgtggactccatttttaagtccactggtctatctctagtggacaatccagcagtacctatcaaagcttcagcaagtctacctctaagatccacctctactgtctacctctaagcaatcctctaagtctacctctactgatccagcaagtctacctctaagaatgtatcccaggatatacttgtgaagatggaaaaggactgagtattatgattaattactgaagaatggtttctaatggtaaaagattggaaacaacctaaatattcaccaagaaacatctggctaaatctacggtctatacacacagggacattgtgcagttatcataccacactttgtatgtatactatgatgtcaaagtcactcacggttaatgttctttttcaaaagaacattagaggtagattttctggaccagtgtggatctgaaactttaacagatactcccagatttcccactagagataaattggcagtcttaaaaatgggttcacggtctttcgtgcctttggctttagaagacacggtggccagcctactgttctttggatcatcccactcatttctgttgggtaatttctctaatttttcctcctctggctttcttttagcccctttatttatctaagttaaaatttcaaatatttttccaaattaccaaaaataattccattaagaatttgattgagactgggcgcagtggctcacacctgtaatcccagcactttgggagactgacgcaggtgaatcacctgaggtcaggagtttgagaccagcctggccaacatcgtgaaaccccatctctactaaaaatacaaaagttagatgggtgtggtggtgcacacctgtaatcccaactacttgggaggctgaggcaggagaattgcctgaaccagggaggcggggttgcagtgagcccagatcccaccaatgtactccagcctgggtgacagagtgagactctgtctcacgaaaaaaaaaaaaaaagaatttgattgagtgaaaatacctgggcaggagagacactccattctttgtgcctttgatgctctattgtacctttttcttttcttttcaagacatggggtctcactatgtttctcaggccggacttgaacttctgggctcaagccatcctcccacctcagacttctaagtatctgggactgcaggtgcaagccactgcacccaactcttaatgtaccttttacacacatttgtgtcacaacacctgtgccacacccttaacagttttgcagatgcacatcccaacgtttttcagttttgagaaaaatcacttttatttggtaaaaatcacacatgcttatgaaaataattacacattgcaccaaagtgacaaagatgaaagtaatcactccagatcctagttccgagaggttactatctttaacagtaggcaaataataaaatcccaggttttttgttttttcttttgagacggagtctcgctctgtcacccagactggagtgcagtggcacgatctcggctcactgcaagctccgcctcccgggttcaggcgattctcctgcctcagcctccccagtagctgggactacaggcgcccgccaccatgcctgggtaattttttgtatttttaatagagacggggtttcaccgtgttagccaggatggtctcaacctcctgacctcatgatccgcccacctcagcctccaaagtgctgggattacaggcgtgagacacggcgcctggccaatcccaggtattttttctatgcaaatatacagaaggctggatggataaacagataatacatgtaaatacttaaattagaatgtggcccaggagaacatgaactccatgaggtcagggatttttgttggctaggttcacttccacatctcctgtacctagagtaaggtttctcagcctgggcactactgacatttgggctggataactctttttgtaggagattggggtgggtggggagcgtgccatccactgcactgtaggatgctgagtagtgtccttggcctctaccctggcagaagcatccatgtgacaaccaaaactgtctccagacattgccaattgtcccctgggggcaaaactgccaccaagtgagaatcactaacctagaaaagtgagtgttcaatacacaataagtgcttgttaaatgtattacacaaccggaaaatgatgtaagggcaagttaaaaagtaatgcaaactggccgggcacagtggctcatgcctgtaattccaacactttggaggccgaggtgggcagatcaccttgaggttgggagttcaaggccagcctggctaacatagtgaaaccccgtctctactaaaaatacaaaaattagccaggcgtggtggtgggcacctgtaatcccagctactagagaggctgaggcaggagaatcaattgaacccaggaggtggaggttgcagtgagcctagatccccgccattgcaagtcagcctgggcaacaagagcaaaactccatctcaaaaacaaacaaaaaaaaaagtaatgcaaactcatctgggttttggtcatgtcctgcatctcctgaggaagggcagagggctgaggagcagtccttgggaagcacaaacatgtgagaatccaggttggctctatgccctacccagtaacgtagccccaaatctctgccttagctgacatgggggcacactgaagtcttgtgaagggtagaagggaccatgttgaggcagggacaaccttgcctacaggtgattcaggtaatcccacaagttcagccacagaaaacaagcatgaccatgtgcaaagacttccacgagaccacttgtcacagggttgttttaattcaagcaacatcaacatacaccagaaacttgtgaagaaaattatggcacatttgtataacttcagtgtcaagaagccagcggtattttgcagataatgcaaggtctgtagatcgaaaattaagttgggtgtcttcctttagtgtacaaacaccttggatgtttgaggaaatccaaagacaaggttctaggcattttatacgtgttaactcatgtattatgttaattctcacaataatcctttggaactagtacgatcaccatccctgccttattgaggaggaaatggggtacagagagcttaagcaacttgccagtgtcatgcagcagggaagcgctggaggcagggctccaacccacgcagccttgctgcatgtttgtggaatgaacacaggactcaggcacacaaccatctggctgaggctccatgagcagccaggagcctggtcccaatgcagtctccttataggcacaaatggggtgccccttgagacaggaataataaaggtggtcacaggagaacggaaaattccaggcaacagtttcacatgactagcaaaggaaaccgttgaaatcgctgcgtaagctaggggcggataagactctgaaaaccagggtgtgggccaagctggctaaagccgactggacccaacatggtgctggattcgacccgtttcacctaggacctctcattatgtgctcattaacatactaagtcacacacccactgtgacagctctggggaacacccgtatttagtataaaaatgtgtggcaccgcagtaccaagaaatgtttacctttttccaagaatcttcatgaatattccaccccttggttaaataaatatttaaaggtagctccaaaccccgctgggcgtgatgctctgtggtatgcctgcacttttctttcttcagtacgtacttattcccgtcgcaatgaatctccacactttgttctgctcatccatgaattccttctcacgacagtgtcaagagcctggacaccagtcagggtcgaggcctcaccagcatcttggggcctcactgggcacagacgcgtgagcgcccggcctgcagacctgactctggcagccgctcaggccctcagagggagagatggaagctggcaggacgcagttgctaccgcgcggacccggcccccgaccagccttggcccctcgcgcgccgggacagggccacaaatgactgcacctgggcttcgctggcccaggcaccacgcgactctaagcgcgcccaaagcgaccctctgcgcaaactacccccggggacgacgtcacccgtgaggtcccgcggcgcctcctcctaaagctcggctgggaaaccgtccgcttccccaagacttgggggcttgtggccgagttgttttagttttcctgtaggattcacgggtggctgaggcaaacacgcttgaaggcctaagacttttaagtctcttccgcaccctctcttctgtctcttccacctggaggatgaccgcttttttgggggttttgttgttgttttgagacggagtctcgctctgtcgcccaggctggattgtagtggcgccatctccgctcactgcaacctccgcctcccgggttcaagcgattctcctgcctcagcctcccgagtagctgggattacaggcgcccaccaccatgcccggctgatttttgtatttttagtagagacggggtttcgccacgttggtcaggctaatatcaaactcctgacctcaggtgatccgccctcctcggcctcccaaagtgctgggatgacaggcgtgagccaccgcgcccggccgggatgactgttattaacaattcccggcgtggtttctagcaccagcccacctaccacaccccacctcgcttgaggctgaatgggtaacaggatgaacccgcccctgggctggttttctctgaaccctaactcctgccgttacgccccaccagctctaggccaggaactctatgtgccccggccacgctagagcccgtacctagacccgtaggtcgggaggcctgcgcccggcactgcgcagacgcagcgtgctgtgcccagaactcttctgttcccaggagaatcaggggagtcggcgccggaaggggcgggtccgagctgagatttccagagccatgggagccggaagtccaaggaactgtacctccatcatgacgactccggttacgtaaaaacattcaaacagaaaatgctggccaggctcatgcctgtaatcccagcactttgggaggccgaggcgggaggatcgcttgtgcccaggagttggagaccagcctgggcaacatagtgagaccctccccccacccatctctacaaaaaattttaaaattagctagctgagatcatgccactgcactccagcctggacaacaaagtgagactatgtctcaaaaaaatttaaaaattacccacgcctgtagtgtcagatagtcaggaggcagaggttggaggatgacttgagccttggggatcgagggtgtagtgaggtatgatcgcaccactgcactccagcctgggcaacagagcaagaccctgtctcaaaaactatataaaagaaaaaagggctgggtcggtggctcacgcctgtcatgccagcactttgggaggccgaggcgggtagatcacctgaggtcaggagtttgagaccagcctgaccaacaaggtgaaaccctgtctctactaaaaatacaaaaattagctggccatgatggtgggtgcctgtaatcccagctactggggaggctgaggcaggagaatcacttgaaccccagaggtggaggttgcagtgagccgagatcacaccactgcactccagcctgggcgacagagcgagagactccgtctcaaaaaaaaaaaaaaaaaaaaaaaaacagaaaaaaggccgggcacggtggctcactcctgtaattccagaactttgggaggccaaggcgggcggatcaggagttcgagactgcctgggcaacatagcgaaaccccgtctctactaaaaatacaaaaaattagccaggcgtggtggcgggctcctgtaatcccagctactcaggaggcttaggcaggagaatcacttgaacccaggaagcagaggctgcagtgagccgagatcacgccattaaactccagcctcggtgacagagtgagactccatccccgctccgctccctcacctcccgccaaaaaaaaaaaagaaaatgcactgcaatagaaaaataaaagtactacactttggtcaaacagggtaactactagaacgtaaaatgatctttttgaaactatccacatttgttacacgtgttgaaaatgtaggatatatatgttatatatatacttatatatgttatatatacttatatatgttatatacttatatatgttatgtacttatatattatatatacttatatatgttatatctacttatgttatatacttatatatgttatatatacttatatatgttatacatacttatatgttatatatacttatgttatatacttatatatgttatatatacttatacatgttatacatacttatatgttatatatacttatatatgttatatatacttatatatgctatatatacttatatatgctatgtatacttatatatgttatatatatacttatatgtatgttatatatacttatatatgttatatatgcttatatgtatgttatatatgcttatatgttatatatacttacatatgttatatatacttacatatgttatatgtacttacatatgttatatatatacatatatgttatatatatataattatatatatataaaacaaaaagcacggttactacaaagaaaacaggtaaacattaagtggagtaaaagtatatcctgttatataagggacttgaacatgtctgggcatggtggctcaagcctgtaatcccagcactttgggaggctgaggcgggtggattactggaggtcaggagttcgagacctgggcaacatagcaagaccttgtctctattaaaaaatagatagatagatagatagatagatacatagaacatcaaaagagggagagagaaagcagacagatgtggcaaaatatacacaattggtaaatttgggtgaagggaatataagttatttctactaatcttgcaattcttatgtatatttgcaatgatttctaaataaaagtttttaattaccaattgaaataaagtaaaataagtcactatctagccttttctagacaaatattttaaactcttacacagagataagttaatcaagaaacgtatttcctggaaaaacccgtgatatgggtggagccacctgggaataaaaggtcggaacatcataatcactgtcagactcaacttccatcattctcctccaggcgctatggagtctaatccaggcactttggaaggctgaggctggaggatcgattgaggccaggagtttgggaccaccctgggcaacatagcaagatctcatttctgaaaaaagaattatcatccactcacccagaacagctctccaaactgtaagtttcattcaaggtttgcttgtttgggtgatgggatgtgtgtgtgtgtgtgtgtgtgtgtgtgtgtgtgtgtgtgtgtatgtgtgtgtgagtgttggaaggagggtctgtctaaacttaatgccctaaagatattgtcagatattgtgatgaggggaatttcatcttctaccctttatgaggttgaattgtaaattcgaaaatcctgattctgggtttttattttgaggggatagttttctgttttctgtggcattggatattggcattttcagaaaagagcatgcatccaaaatgaaaatgatgaagcctacctgtcttttgaactcagctcagggaaaagctgatgatctctaatttttgtgattcctcctttcattaaatttaaggtccagtgagggtgaagtttccctaaagaggcaataatttatcagcagcaacaggatgaaatggaggggcttttcttcacactctatatattatgttaggatctctcaggaaactgaggacacattaattataatcatggaagattttctgcttcccacatggtttgctgggtttggcatagtatagctcatgccctacattgaagaaatgtgggcacccatcaacagcagccatttctgattacacatccctgtttctttagctgagtgactcctaaaagtcccttaatgtattaataatgcatttggacctcagttttcttactatgttaaatgtaataaaattgaatatcatatggtcacttgcagaattaaatggtattaaggcatgtaaatcatatagagtgatgtagtacaacaaacaataaacctgtaataaaagtcactaaactcccttccctcccatgatggagccttaattttctctatatgaggcatccctgtagtttaatatattcttagaattagcaataggaatatgatgtcaacaattaattttgagccattttagcccaatgacttatcctaagaagtcgctattattgttgccatcccgttttcacttatacgaaagtaagactcaggagggttgagtttcagccttagtgttagaaaagcagtaagcggtgaagccgggcttggaatcctggaagttggaatgtacaatgtgtgatctcgatgcatcctctctgtagtgcctctttgtaacaagaaaaaaataaagatacttaaagttctaggtaagcaaagtcagaactagtctttaagttagagacccataaagtataaggtttctcaaacaacaaatgttgttagaaggtcttgttgtggcagagttccaagaaaaccaatgaatgtgaagtcagttgatatattaatctaatctgtgtaattggggaggggcacttttaggaatgcatttagagataatcccattaacacaggaggttttctcccagattaaattaacgtaaacgactttggaggaaggttggttttcccagtttctaagatataatgcaataaattaacatgaaagatggttgggactatgtgcagactttttaaataaacctcagtttcaggactctgacctttttgtttcttcctagtaacagccgtggcagtcagagctctgcctgcagtgtgaccatggacagctctccaaagcttaaacttcagtaaattgactcaagtttcttcggaaagaactgtgagtagcaaagggcaactttttctgttggtttcattgggatttcactgcttttcctgaaattggaatgttggaaggaagtaggcattcctcactgcctggggagaaatgggcaaatgagtaaggggagggagcaaattcagagagatattttttattttttctgaaacctgtttgtgttttgagatgtctttcccttcatgtttttttttttttcactcttcatatttccctttctctgtctctctccccacctcggttttgctaattagctagcacaacaactcgccatcttactccttttccttactccctgttttttgtggggttttttttttggttttcttttttgttttttttttgtttttgtttttgttttttgtttttcagacagagccttgctgtgtctccccagctggagtgcagtggcgagatctctgttcactgcaacctccacctccagggttcaagcgattctcctgcctcagcctccccagtatctggcactataggtgcctgccaccatgcccggctaatttttgtatttttagtagagaccaggtttcaccatgttggccaggctagtctcaaactcctgacctcaggtgatccacctgcctcagcctcccaaagtgctgggattacaggtgtgagccaccgtgcccagacagaacttctttatttttgccttaattttgttatttaaccagtagtcattcaggagcatcatatagagtgatgtagtacaacaaacaataaacctgtaataaaagtcactaaactccctttcctcccatgatggagccttaattttctccatatgaggtagtttaatatattcctaggattagcaataggaatatgatgtcgacaattaattttgagctgttttagcccaatgacttatcctaagaagtcgttattattgttgcagtcccattttcacttatgtgaaagtaagactcaggagggttgagtttcagccttagtgttacaaaagcagtaagtggtgaagccaggctttccatgtagttgtgtggtttttagtgagtttcttaatcctgagttataattggattgcactgtggtctgagagcttgtttgttatgatttccgttcttttgcatttgctgaggagtgttttacttcgaattatgtggtcaattttaaaataagtgctatgtggtgatgataatattgatctatctaatattaacaggggggtgttaaagtctcccactattattgtgtgggagtctaagcctctttgtaggtctctaagaacttgctttatgaatctggatgctcctgtattgggtgcatatatatttaagatagttagctattcttgttgcattgatccctttaccattatgtaatgccctctttgtcttttttgatctttgttggtttaacatctgttttatcagagactaggattgcaacccatccttttttttgctttccatttgcttggcaaatattcctccatccctttattttgagcctatgtatgtctttgcacatgagataggtctcctgaatatagcacatcaatgggtcttgactctttatccaatttgccagtctgtatcttttaattgggggcatttagcccatttacatttaaggttaatgttgttacgtgtgaatttgatcccatcatcatgatgctagctggttattttgcacattagttgatgcagtttcttctgtgtcattggtctttatattttggtgtgtttttgcagtggctggtaccggcttttcctttccatatttagtgcttcctccaggagctcttgtaaggtaggcctggtggtgacaaaatccctcagcatttgcttgtctgtaaaggattgtattttttcttcgcttatgaagcttagtttggctggatatgaaattcagggttgaaaattccttaagaacgttgaatattggcccccactgtcttctggcttgtagggtttctggagcaatccactattaatctgatgggcttccctttgtgggtaacccgacctttctctctggctgcccttaacatttttttcctttgtttcaaccttggagaatctgacgattatgtgtcttggggttgctcttctcgaggaatatctttgtggtattctctgcatttcctgaatttgaatgttggcctgtcgttctaggttggggaagttctcctggataatatcccaaagtgtgttttccaacttgattccattctccccgtcactttcaggtataccaatcaatcgtaggtttggtcttttcacatagtcccatgtttcttggagcctttgttcattccttttcattcttttttctctaatcttgtcttcacgccttatttcagtaagttgatcttcaatctctgatgtcctttattctgcttgattgatttggctattgatacttgtgtatgcttcacgaagttctcatgctgtgtttttcagctccatcaggtcatttatgttcctctctaaactggttattctagttagcaattcctgtagccttttatcaaggttcttagcttccttgcattgggttagaacatgctcctttagctcagaggagtttgttattacccaccttctgaagcctagttctatcaattcatcaatctcattctctgtccagttttgtgtccttgctgaacaggagttgcgatcatttggagaagagacattctgttttttggatttttcagcgttgttgtgctggtttttcctcatctttgtggatttatctacctttgatctttgaggctgttgatctttggatggggttattgtgtgggggtcttttttgttgatgttgatgttgttgctttctgttagtttttcttctagcagtcaggcccctcttctgcaggtctgctgcagtttgctggaggtccactccagacccttttcacctgggtatccccagcggaggctgcagagctgcagaacagcaaagagtgctgcctgttccttcctctggaagatttgtcccagaggggcaccagcctgatgccagccagagctctcctgcatgaggtgtctctcaacccctgttgggagttctttcccagttagaaggcacgggggtcagggacccacttgaggaggcagcctgtcccttagcagagctgttgtgctgtgctgggaaaatccctcttatcaggatcagctgctctcttcagagccagcaggcagaaaagattaaatctgctgaagctgtgtgcccacagccaccccttcccccaggtgctctgtcccagggagatgggaattttatctgtaagcccctgactgggactgttaccctttcttcagagatgccctgaccagtgaggaggaatctagagaagcagtctggccacagctgctttgccatgctgtggtgaactttgcccagtccaaacctcccaccctccttagcactgtccagggaaaactctactaacgcctcattaatcacggatgcgcctcccccaaccaagttccatcattccaggtcaacttcagactgctgcactggcagtgagaatttcaagccagtggttcttagcttgctgggctccatgggagtgggacctgctgagtgagatcacttggccccctggcttcagccccctttccaggggagtgaatggttctgtctcactggggtttcaggcaccactggtgtacaaaaaaaaatcaactcttgcaactagctcggtgtctccccgaacagctggctagttttgtgcttgaaacccagggccctggtggtgtaggcacacaagggaatctcctgatctgcagattgcaaaaactgtgggaaaagcgtagtaaccgggcgagtagcatagttcttcacggcttcccttggctgggggagggaggtccctggctccttgcatttcccaggtgaggcaatgccccaccctgcttctgctcgccctccatgggttgcacccactgcctaactagtcccgatgtgatgaactgggtacctcagttggaaatgcagaaatcgcccaccttctgcattggtctcgctgggagctgcagagcggagctgttcctatttggccatcttggccccgccccttttttaattttaaaaaattttatgtagcgatgaggtctccctattttgccatgctggttttgaactcctgggctcaagtgatccttccacttggcctcccagagtgctaagattacaggcgtgagccaccatgcccaaccaaatttgtattttctcgatgagcagtgatgctgagcacctgttcatatctctgttggccatttgtatattctttctcgcctaacagctcccttgaaaatgcgtgtgcctcagtctatgtcttctggagaactggcacagcttcagaatattagcaccccaaaagagtattttacttagagcataagaagactaaaaataaatcattattatatgtggatgaggtttttcataaaatataactgttaatatattcttggttaaaatgcatgtgtgcttttcttctttaggttacataaagaaaggatgatatctctaaaggtatgtggattcatccaaatttggagccagaagactgggatgactaagctgaaagaagctctcattgaaacagtgcaaagacaaaaggaaattaaactggtggtcactttcaaatctggaaaatttataagaatttttcagctgagcaacaacattagaagtgtggtccttagacattgtaaaaaaagacaaagtcacctgcgtttaactttgaaaaacaacgtgttcttgtttattgacaaattatcctacagagatgctaaacagttgaatatgttcctggacataatccaccaaaacaaatctcagcaacccatgaaatctgatgatgattggagtgtgtttgaaagcaggaatatgctgaaggaaattgacaaaacttcattttacagcatttgtaacaagccaagttatcagaagatgcctttgtttatgtcaaaatcaccaacacatgtgaaaaaggggatattagaaaatcaaggtgggaaggggcaaaacacactatcatctgatgtacagacaaatgaggacattctgaaggaagataaccctgtaccaaacaagaaatataagacagattccttgaaatatatacaaagcaataggaagaacccatcaagtttagaggatttagaaaaagatagagatttgaaactcgggccttcattcaataccaactgtaatggaaatcctaacctagatgagactgttcttgcaacccagactctcaatgccaaaaatggtttgacatctccattggaaccagagcacagccagggtgacccaagatgcaacaaagcccaggtgcctcttgactctcattcacagcaactgcagcaggggttccccaatttgggaaacacctgttacatgaatgcagttttacaatcgctatttgcaattccatcttttgctgatgacttactcactcaaggtgtcccatgggaatatattccctttgaggctcttattatgaccttgacccagctgcttgctttgaaagatttctgtagtacaaagatcaagagagaattacttgggaatgttaaaaaagtcatttcagcagttgcagaaatattttctggcaacatgcagaatgatgctcatgagtttttaggtcagtgtttagaccagctgaaagaagacatggaaaaattaaatgccactttgaatactgggaaagaatgtggggatgaaaattcatctccacaaatgcatgttggtagtgctgccaccaaagtgtttgtttgccctgttgttgctaattttgagtttgaattgcagctctcccttatttgtaaagcttgtggtcatgctgttctcaaggtagaacctaataattatctctccatcaacctgcaccaagaaacaaaaccacttcctttgtccattcagaattctttagatcttttctttaaagaagaagagcttgaatataactgtcagatgtgtaagcagaagagttgtgttgcaaggcatacatttagtaggctctccagggtccttatcattcatctgaaacgctatagcttcaacaatgcttggttgctggtgaagaataacgagcaagtttatattcccaaatctttaagtttatcttcttattgcaatgaaagcaccaaaccacctcttcccttgagcagtagtgcacctgttgggaaatgtgaagtcctggaagtctctcaggagatgatttctgagatcaacagcccattgacaccatcaatgaagctgacctcagaatccagtgattccctggttctacccgttgaaccagacaagaatgccgacctacaaagattccagagagactgtggagatgcaagccaagagcagcatcagagagacctggaaaatggctctgcactagagtcagaattggtccactttagagatagggcaatcggtgaaaaggagcttccagtggctgactcactgatggaccagggagacatttctcttcctgtgatgtatgaagatggagggaagctgatcagcagcccagacacaaggcttgtcgaggttcatcttcaagaggtgcctcaacatccagaacttcagaagtatgagaaaaccaatacattcgtagagttcaattttgacagtgtcactgagtccaccaatggcttttatgactgtaaagaaaacaggattccagaaggatctcaaggaatggctgaacagctccagcagtgtattgaggagagcatcatagatgaatttcttcagcaggcaccacctccaggtgttaggaagctggatgcccaggaacatacagaagagaccctcaatcagtctacagaattaagacttcaaaaggctgacctgaatcaccttggggcactgggttctgacaacccaggaaacaaaaacattttagatgcagagaacacaagaggtgaagccaaggaactaacaagaaacgtgaagatgggggatcctctccaggcctacagactcatcagtgttgtcagccatatcgggagctccccaaattcaggccattacatcagcgatgtgtatgactttcagaagcaggcctggttcacatacaacgatctatgtgtatcagaaatctcagagaccaaaatgcaggaggcgaggcttcactctgggtatatcttcttttacatgcacaatgggatttttgaggagctgttaagaaaagcagagaactctcggctacctagcacacaggcaggggtgatccctcagggggaatacgaaggtgactctttgtacagacctgcttgacagactcactcggcctcacttcatccttgcaaagagaatcctgtacttcatccttgcaaagagaatcctgtacttcactcagaatgaaggaacaagtatctcaggatgaaatctcaatgaaaaacacttattttgggggaatatctattttaactgcttcagacacctagatcccagaactcaggcgcatatgcatattttccctgcaagattagaatggtgctcttcacgttttgacggtggttttcaaaatgttgttcttcaaccagcaacagcaacagctagggactgattagaaatgcaaattcttgggtcactctctagaccaactgatgcagaaacaggaggtgtgagccagcaatcagatggagattctagtgctcatgaaagtttgaagaacactggtaatgtgtggagtatcttggtgtattttgctactgttgatatggattgcttatgttatataaacgattttcattaaattttttgcactcttttattttgtcccactgaacctaagactagatagagtcaccccaaaagtggcagcagggaaattccaacaagagagtgcccaaaaccattctgagatcgggccggttgggattccaaagaaagaagcaccaaacaccagagggatctttccggagcatttattagggggaacttagagagttctgcagcataccctcaggcggacagtgagagaaaaaagcatggtcaaccagctgggcaccgtggctcatgcctgtcatcccagcactttgggaggccaaggtgggaggactgcttgagcagaccagttcaaaaccagcctgggaaatatagcaagaccctgtctctacaaaaaataattcagcagccaggcacggtggctcacatctgtaatcccagcacttgggaggccaaggcgggcggatcacctgaggtcgggagtttgagaccagcctgaacaacatggtgaaactccgtctctactaaaaatagaaaattagctgggtgtggtggcaggcacctgcagtcccagctactcaggaggctgaggcaggagaatcacttgaacccagcagatggaggttgcagtgagccgagatcgcaccactgcactccagcctgggcaacaagagcaaaactccatttctaaataaataaataactttgccaggcatgtctcagctgctcaggaagccgatgtgggaggatcacttgagtctgggagttcaaggctgcagtgagctatgatcacactactgcactccagcctgggtgaaagaccctgtctcaaaaaaaaaaaaaaaaaaaaggcgggaggggggatggtctaccttggtgtgtctgctgcagtgagagggtcagggtatggggttatataagtttataaggaatttggtcaagggtggggactagtttcttttagtgttttgggcaacaacctaaacctaaatacctctatcagtgcctgggaatgtttcaggctctactttggattcaagccttctgggaaaagcctgcagcttggctggtcagagtggtcaaagcagtccatgattttcagtcacgacacagaaagaaagcagggggtgagtacttttcctttgtaaagttattaaaataataacccaacccatacatataccattggctagcttccacatgtgtttatgactggtgactagtaaaatttgctatgcagcaatcaactgttatttaccattttccaggaatttcagggcataacattagggttatatgcaaaatgcagtatactaaatatccgtgtgattttgtgaattcaaaagcactgcaagatgttgctcatgttattaatatgaataagacgataaacccatcctcataaatgtacaacatttcctggtggccaagccttaaacagcttataatgtacccagtatcagtgggtgatgtgttagactgtgaattcagcaaggagtaaagaacgatttttttaaatggccatgtgagtagacaaatggaaattgagaggattttttgggtaaaaagagataagagcctggtattatataaggaatggggcaaaattaggcagagtaggtgtgggaaagaagagaagagcaaccagaaacatacgtacgaggtttttaaaaatacattatttttagcatttaagaggaaaagaaggaaagtactatgaaaaaagaaatgtaggccggtcacagcggctcacgcctgtaatcccagcactttaggaggccaaggcaggcggatcacaaggtcaggaaatcgagaacatcttggccaacatggtgaaaccccgtctctactaaaaatacaaaaatgagccaggcgtggtggtgcatgcctgtcgtcctagctactactttggaggctgaggcaggagaatcacctgaaccagggaggcggagattgcagtgagctgagatcacaccaccgtactccagcctgggtgacaagagtaaaactctgtctccaaaaaaagaaaaagaaaagaaagaaacgaggctgagtgccatggctcatgcctgtaatcaaagcactttgggagcctgaggtggaaggattgcctgagcccaagagtttgaggctgcagtgagctatgactacaccactgccctccagcctgggcaacaggtgacaccctatctcaaaaggaaaaacaaaaaaggcaaatggcaattgcagtgaagaaatgccaagataccttcatgctcaggagagaaagctgtacttcctggatgtggtttccagtcccctacacctctagagaaacctctccactcatgaattatagaaatcatccctaaaagtataaagtgctgtcttatttgtttattttattttatcttatttttgagatgaaattttgctcttgttgcccaggcaggagtgcaatggtgcaatattggctcactgcaacctctacctcccaggttcaagcaattctcctgcctcagcctcccgggtagctgggattacaggtgcccacaactatgcctggctaatttttgtatttttggtagagacagggtttcaccatgttggtcatgctggtctcgaactcctgacctcaggtgatgcgcccacctcagcctcccaaagtactgggattacaggcatttgagccaccacgcctggccaaaagtatagtcttttaaacgtttttaaagatatggataccactggtcattattcactggaataaaactccatcagggttttagcacatttggtttattgctacatcttcagtgtttaagagttcctggtacacaaaaggcatctaataaatatttatacttaataaacatttgctgagtgagtatgccgaatgggttttcaaaggatactgtgataataagtcctcgctaccttcaaaaatagcctccaaattagaggccatttcaacatggaattctggggtgacaattccaggcaaccatatcttcccatgtttttttaagtgcatggggctcctatctggagtgaattcttttctggtgcctaacaaggtatgacctgtcagcgaaggctttaccgcattcagaacatccataaggtttttgtccagtatgggtttttttatgcaaactaaggtttaatttccggatgaaggtttttccacattcactacatctataggtcctctctccgctatgagttttctgatggctatgaaggtttgacttctgaaagaaggcttttccacatctgttacattcatagggcttttccccagtatggatttttttatgttgaatgaggtttttcttctggataaaggtatttccacatagatcacactcataagctctcttcccagtgtgaattttctcatgatcgatgacattggatttctgggaaaaggccttctcacatatgctacatttatagggtttctctcccgtgtgtattctctggtgtttcacaagatctgacttgtaaatgaaagcctttccacagtccgtacattgaaagggtttttgtccagtgtgaacttttttatgttgaatgagggttgagttctgcctgaaggatttctcacattcattacactgataggatttcttggcattatgaattttctcatgattaatgcaggatgatttccaggaaaaggcttttccacatgtcttacactgatagggtttctctttagtatgcattttctgatgttgaaagagatttgacttctgcttgtaggcatttccacagttctcacatttatagggcctttcctctgcgtgagttttctgatgtttatcaagcttccacttctccccgaatgctcttccacagctatgacattcaaagggtttttgacaggcatgcctcctcaggtgactttgaaggcgtgactttgaactgaataactttctacaggcattacatttcagttgttgtcctacaaatttggatggattattgccaactaattttctgtatccattatcatcgtgagaattattttgtacatagtgttgcaaggaagatacatcatctatgcccagtggaagtattttcttagatccgtcacattctacacctttctgcgtagtcagcgtttccttattgattgatgggacttctcttgcgagactctctttcacatcctttggcttccaaatctgccctccaatgtccccatttttttctaaaatggaatacaaaaaaatgtcctgtgtaaaacgttccactcacatgcttgaaataaaatgccataaacaatctattgtggtgattattctggcttcaaacctaatgtctacgagaaaccaaagttaatataagctctgttagagttctatgtgagctaatgttacatgaagctatcacatatctgtctgtaaaggactgagcaacgtagacctagtgcacagggagcaggtgagagcctagggataccagggagagggagattaagaaagagagtttgccaggccaggcacaggggctcacacctgtaatcctagcactttgggaggctgaggcgggtggattgcctgaggtcgggggttcaagaccagcctgaccaacatggcgaaaccctgtctctactaaaaatacaaaaaattcgccgggcatggtggcaagtgcctgtaatcccagctactcgggaggctgaggcaggagaatcgttcgaactcgggaggcggaggttgcagtgagcccagatcgcgccactgcactccagcctgggcgacagagactccgtttccagaaaaaaaaaaaaaagaaaaaaaaaagagtttgcctgcaaaggaaaacccagataagaatgtaaagaaatttctgagtggagaaaaatacctggagatttcttccagcactcccaggaagtcacagctggctgccaaacgacttcctcatttagaaaagctgaattggcttccatgcaccattgacccacagtgctctcctggtcacctacctgcacggccacttcccagcacttcctcttcctccaaccatggctcctttccttgttccaacctcaagatcacatcgggtttggtggtttccccttgtcctgtgatggaagataccgcaaggcttggtgtttgtggatgtgtgagttgtttgtgcaagtgtatgagtgtatataagcgcttgcgtatgcttgtgtgaatatttgtgtgtgagtgtgagcatttatatgtcagtgtgtgggtatgtgccattggttggggggagttgtgtggatggatggtttgagggaatgcacctgagcagtcgaactaaacaaagaatgctttttctgggctgggtgtggcggctcatgcctgtaatcccagcactttgggaggccgagataggagaattgctagagcacaggaatttgagaccaacatgttacatgtaacatgaagatagcaagacccagtctctacaaaaccaaagccacgtgtggtggtgcacgtctgtggtcccagctattcaggaggctgaggtgggaggatggcttgagcccaggtcaatgttgcagtgacgccaggcgtggtggttcatgcctgtaataccagaactttgggaggctgaggcgggccggttatctgaggtcaggagttcaagactagcctcaccaacatggagaaaccccatctgtgcaaaaaatacaaaaattagccaggcatggtggtgcacgtctgtaatcccagctactcgggaggctaaggcaggaaaatcactggaacctgggaggcggaggttgcagtgagccgagatcacaccactgcactccagcctgggtgacagagcgagactgtctccaaaaaaaaaaaatactacagtgagctatgattgcaccactgcactccagcctcggtgacacagccagaccctgttaggagaaaggagataaagaaagagagaggaatggagagagggagggagggagaaaggaaggaaggaaggaaggaaggaaggaaagaaggaaggaaggaaggaaagaaggaaggaaagaaggaaggaaggaaggaaagaaggaaggaaggaaggaaggaaggaaagaaggaaggaaggaaggaaagaaggaaggaaagaaggaaggaaggaaggaaagaaggaaggaaggaaggaaagaaggaaggaaagaaggaaggaaggaaggaaagaaggaaggaaggaaggaaggaaagaagggaggtaggaagggaggaagggaaggaggcagggagggagggagggagggagggagggaaggaagggaaagaaagaaatgctttttcttcttggaggataaagcttttccaaaaatcaagaccaggagtagggtgaagggcagggcacccagcccacaaaacttacagaggccctcactcattctcccggcacttgccgaccctgagaatgggggctccttcaatacagcacttggtacacttcacttgcctcaccctagtcccggctctacaaaaacatatgcgaagtgaggagcacctctgtgccaaccctatttggccagccatggggtgtctgtgtgtttcacgccttaggttttgagtccccctgcccgggaagccgtccttacccacagagacaaggttgctgtaattctccagcatcacatccctgtacaagtttctctgttcgggattcagccgctgccactccccctgggtgaagttcacagtgacatcctcgaaggtcactcttccctgtaacaacagattcccgatcagtataaaaatgccattgaatcctgcggctgaggatacagaaacttgtttctgctgaaccaagctttaatcatgtccataattcactctactctggatgaaaataaattgtgcccagaggatcttgccaatgagccataaaccttagacctactcatgacactgccatctttctccaccctctagtcccaccaattttacttcctgaatctcaaacccagccattagtttccatcttctccaccattcataaatccaccttgtcatcttttacttagagtaaggcagaggccgagtatggtggctcacacctatcatcccaacattttgggaggccgaggcaggaggattgcttgaggccaggagtttgaggctagctggggaacatagcaaaacccctatctcaaagaacattttattattttggccgggcacggtggctcacacctgtaatccctgcactttgggaggccgaggcgggtggatcacctgaggtcaggagttcgagaccagtctggccaacatgaagaaaccccatctctactaaaaatacaaaaaattagccaggcatggtggcaggcgcctgtaatcccagctactcaggaggctgaggcaggagaatcacttgaacccaggaggtggaggctgcagtgagccaagattgcgccactgcactccagccagggcaacaagagcaaaactctgtctcaagaaaaaaaagaaaaagaaaaagaaaagaaaagaaaatgttattatattttttttctattttccatttttctttaagacatcctgcctctattagaaattcttttttaaatagaggcctggcatggtggctcacacctataatcccagcacttcaggaggctgagacaggtggatcacccggggtcaggagttcgagaccagcctcgtcaacatggtgaaaccccatctctactaaaaatacaaaaattagccaggtgtcgtggtgcgcgcctgtaatcccagctactcaggaggctgaggcaggagaatcgcttgaaccctgggaggtggaggttgcagtgagctgagatcacaccactgcactccagcctgggtgacagtgagactccatctcaaataaataaatacataaataagtagaataagccaatagccccctaattcttccagctacatctaaactgactgtaatctattttccacagtcgacattcagactggatggtgcgctcccctaatttatcagctttccttgcatttgggagaaacaggtgacacctgttacaggggccagcgtctggcatgtctaccacactcccactcacacagggtcacacagcactcccctgggtctctcctgcagccatactggacttacggcagcattttgcccctgccactcaacactcacagtgttggaagtcacacttgtaaagcgaattcctttgtcagaaactgaaaatctcacctctaagagccagcacctagtgtcctcttggacagataaattttttagttgtgtttgtgctctagctcgcttttttaaaattttgtttatttattaattttttttggcggggaaggggacagaggctcactctggtagcccaggctggagtgcagtggcacaatctcggctcactgcaacctccacctcctgggttcaagcgattctcctgcctcagcctcctgagcagctgggattacaggcgcgcaccacgacacctggctaatttttgtacttttagtagagacgggtttcaccatgttggccaggttggtctcaaactcctgacctcaagtgatctgcccgcatcggcctcccgaagagctgggattaaagggatgagccaccgcacccggcctttttttttaaatttttgacacaggttcttgctctgccacccaggctggagtacagtggcatgatcatggctcactgcagcctcaacctcccaggatcaagcaatcctcctacctcagcctccagaatagctgggactacaggcatgcaccaccatgctaagctcattttttattatttgtagacagggtctcactatattgtccaggctggtcttgaactcctggcctcaagtggtcttcctgccttcgcctcccaaagtgctgggattacaggtgtgagccaccacacccagccttagtatgcctttcctgtcaacaggaaattggtcaacaggcttaattttaacaattgcaaagaaactactatctgcctaactgcatacaacttatccttggtctttcagctatccataatttactttgattccgactggtactagttaatgatttttcagtttattgtgtggatttacagaatttgtttcaaatacacaccgaacaaagttgggagaggacacacattcaagacaccaatcatttaaaaaataggttggggtgaaacacacatgacactgttacatctcagggcttagcagtggaccaggtttgtaagagcaatggtcaaaagatgcttgaggctgggcgtggtggctcacccttgtaatcccagaactttgggaggctgaggcgggtggatcacctgaggtcaggagttcgagaccagcccgaccaatatggtaaaaccccatctctactaaaaatacaaaaattagccgggcgtgggcgtggtggcgtgcgcctgtaatcccagctgctcaggaggttgaggcaggagaatcgcttgaacctgggaggtggaggttgcagtgagccaagatcaagccattgcactccagcctgggtggcagagggagactgtctcaaaaaaaaaaaaaaaaaaaaaaacaacaaaacaaagatgcttgagctgaaaccagcccagtaatcccatagacagttgtgggttttttgttttttgtttttgtttttgtttttgttttttggataaacatagaaattgacccttccgctgttaaagcttgaaacctgtatttgttttgtctgagttccttcctcaggaaaagaccttcagatctctcaaaggcaggcagatcacctgaggtcaagatttcgaggccagcctggccaacatggtgaagccccgtctctaccaaaaaatacaaaaattagccaggagtggtggtgcgcacacctgtaatcccagcaactcaggaggctgaggaaggagaatcgcttgaacctgggaggcagaggttgcagtgagctgagattgcaccactatactccagcctgggtgacacagcgagactccctcaaaaaaaaaaaatcaactgaaactcaccacaactgaaactcaccacaacagatgtctccttgccccctccctagtcttgctttcttacacattgttatatttcttccatgctgtataaacccctagttttagtgagttagggagatggatttgaggctgagctcccatttcttcacctacggcagctgattaaagcttcttccttggcaatacccattgtctcagtcattggctttctgtgcagccagtagcaggacctagaccaaactcctggtgtttccgtaaccaagctttttttttttttttttttgagacagggtcatgctctgtcacccaggctggagtgcagtggcacaatcatggctcactgcagcctcaacctcccaggttcaagcgattctcccacctccgcctccagagtagctgagactacaggtgtacgccaccaccaccacacccagctaattttttgtagagacgggatctcgccatgttgcccaggctggtttcaaactcctgaactcaagcgatccgcctgccttggcctcctagattgctgaattacaggtgtgagccaccatgcccagccttgagctttacttgaaatgtttcagctttaataggaaagcagaaagtagagtgtgtgttaccttttaatagaagtatggaaggaaggaggaaaatatgccaaaaggttagcacagttaattctgagcaagaggaacgtgggtcatacgtttattcattatgagatttagatttttttgaaaagctcacctgggaattgttcatttcctgttcttcaccagtcagtaaagtcttgggaaggcagatctgagggaaaatggaaaagaaccatgaaatagcagaattcgctttggaagttggggatcatccagcatagaatgctccacaccctggataaaagctctccctaacccactcagaaaagccctgacttgtacctcagtgatccccttctgaaggtcttttttttttttgttttggtttttttgtgtttgtttatttattgagactgggtctcaaagaagaaagtgcaagccaggcacggtggctcacgcctgtaatcccagcactttgggaggctgaagcaggcagatcaccagaggtcaggagttcgagaccagcctgtccaacatggtgaaaccccgtctctactaaaaatacaaaattggctgggcgcggtgactcatgcctgtaatgccagcactttgggaggccgaggcaggcggatcacgaggtcaggagatcaagaccatcctggccaacacggtgaaaccctgtctctactaaaaatacaaaaacaaaattagccaggcgtggtggcgggcgcctgtagtcccagctactcgggaggctgaggcaggagaatggcgggaacccgggaggcggagcttgcagtgagccgagatcgcgccaccgcactccagcctgggcgacagagcgagactccgtcccaaaaaaaaaaaaaaagagagagagagaaagctaaacagcagttcaacagcacctttaaaacaagcctgtgcaaagacaatgaggcaagcatcagatcagctagagcacagtaaggaaggccgagagcagaaaccatgaatcctgaagcagctgtggtcgtgacgaataacgccgcagtgaacatgggatgcagatagcccttcagctttgccataagcgggacagctggatcattggtaattctttgccaaaagcgtagattttggccacgcgtggcagctcacacctataatcccagcactttggaaagccaaggtgggaggatcagttgagcccaggagttacttttttttttttttttttaagaccaagtcttgctctgtcgcccaggctggagtgcagtggcacagtctcggctcactgcaacctctgcctcccgggttcaagggattcccctgcctcagcctcccgtgtagctgggattacaggcatgcaccaccatgcccagctaatttttgcatttttagtagagacaaggttttaccatgttgttcaggctggtctcgagctgctgatctcaagtgatccgccggcctcagcctcccaaagtgctgggattataggcgtgaaccaccacatccagccaagcccaggagtttgagaccagcctgtgcaacatagtgaaacctctgtctcaatgtttaagtaataaagtttttattttttattttattttattgaggcagggtctcattctgtcacccaggctggagtgcagtgatgtgatcccggctcacagcagtttaaaaatccctggctcaagcaatcctcctaccttggcctcctgaatagttaagactatgggtgcatgctaccacatcagctaactttttattttttgtaaagaagggatcttgctatgtcacctaaactggtctcaaactcctaggctcaagcaatcctcctccctcagcctccccaaatcctgggattacatgcatgagccaccacaccagccaggaataaagttttaaataagtaaatatgtttttaaaaagaataaacttgccgggcacaactttaatgtttattaaagtttgaggagtccaattctagcacaaaaaatatatataattttaaaaaacagtaaattgtaaatgctttcaccacaaaaatagattaattagcttgatttaatcatccccccaatgtaaacatgtatcaaaacatcacattgtaccccataaataaacacaattattatttgtcaataaaaagtttttagaagtagctgtgggccagcagtaatgctaaggactggagggccacgaaaataattttgagtgtcctgggagcatcacttttcaatatgacaactaaaaaaaaaatctaaactaccaatgtaaaatatttagcttattccagcaaataggagaggtagaaaaatgaaactaagtaaaaatgcaaaacaaacaaacaaacaaaacccagacatttggttttcagggagaaaaaaaaatcagcttacctccagtggaatctggcataaattagcaagttgattgatttctgatgcctgtggtcttttcttctgaaagggactgaaaatgaaaaggcgtgtatactgaaaagctacactaatgactaaaacttaatcggccctctacccgctgtattccgcatcataatccagtcaagaaacaacccaaaacactcacttcctatcaaaagccccacctgatcctatcaggccacatcaaaatttcaattcccaattctttcctcgacttctccaaaactgaatgaactctcataaaaattgtgattgtgaaagcttaattttcaaatctgcccaatcagtttccaatggaattttttttaagttcatgcaagtaaaaattttttaccttaactttgaaatagaaagcatggaaaacattatccaaatgtcagaggatgaaaataaattaaaacaacaaaaattggctgggcacggtggctcatgcctgtaatcccagcactttgggaggacaggagttcaagaccagcctggccaacatggggaaaccccgtctctactaaaaatacaaaaattagctggtcatggtggcacgtgcctgtaatcccagctacttgggaggctgaggcaggagaatcgcttgaacccgggagacggaggcttcagtgagccaagatcgtgccactgcactccagcctgggcaatgagcgagactccatctcacgtctcaaaaaaaaaaaaagaaaggaaaagaaaaaagaaatagggccagcggaggtggaacaatgccttaaagtgctctccgcccgacagaaagaattcaggctccaacctccaactggcaaaatctcttcagctgtactaatactctcaaaatgagatcaacatgccaatccatccccaccctagtctgggtgttgaatttaaacacaggctacatgcccttgcctgcagacatggagaccttccaaaattgagcgtccaactgaattccaagagattaaaccagacttcatgggacaggatgcaccagactagacctcctcccaggagaagaggtatccaaagatcgtattagcaaatgacccttggcggtgtgcggtggctcaagcctgtaatcccaacactttgggagactgaggcagacagatcacctgaggtcaggagttcaagaccagcctggtcaacatggtgaaatcctgtctctactaaaaatacaaaaattagctgggcatggtggtacacacctgtagtcccagctactcagctactcaagaggctgaggcagaattgcttgaacccaaaacacagaggttgctgtgagctgagatcatgccactgcactccagcctgggcgacagagggagactccatctcaaaaaaaaaaaaaagaaaaaaaaagcaaaatgacccagccagcctgaatcccagccgccgtgtcggactactatagtcccagatacttggaaggctgaggtgggaggatcaattgagcccaagaggtcaaggctgcagtgagcaaggatcttgccactgcattccagcctgagagacagagcaagcctgcaggtgaacggaaaggggtggagtgattttatatatatatatatatatatatgtatatatatatatatatatatatattttttttttttttttgtctgagccgctgtgcctggccttttttatttttttttagagacaggctggtctcaaactcctggccccaagtgatcctcccatcccagcctcccaaagtactggtattacagatgtgagccactgcagttggctcaacagcagattttcaatgtagatgaaaaagccatctattggaaggagattccatctaggatttttatagctagagagaagtcaatgcctggcctcaaaacttccaaggacaggatgattctcttacatgaaactaatgcagctggtgactgaatttaatctaatgctcacttaccatttaaaaaattttaaagcctctaagaattatgctggccaaatgcggtggctcatgcctctaatcccagcaatttgggaagccaaggcgggcagatcacttgaggtcaggagttccaagccagcctggccaacatggtgaaaccccatctctactaaaaatacaaaaaaattagccaggcatggtggcccgtgcctgtagtcccagatactcaggaggctgaggcaagacaatcacttgaacctcggaggcggaggctgcagtgagccgagatcacaccactgcactccagcctgggtgacagagtgagactgtgtctcaaaaaacaaacaaagaaaagaattatgttaaatctactctatctgtgctctataaatgaaacaacaaagcctgggtgatagcacatttgtctacagtatggttttgattattttaagcccactgttgagaactatttctcagacaaaaagaaaaagattcccttcaaagcattactgctcttcagatcccaggtgttaagccagtaaacacaataaataaataaataaataagtaaataaataaataactgctcatcaaacctaaacacaaaaatagaaaaataataaaaaagcaaaagaccacacaaaaacaaaatatcactgctcattgaaaatgtatcgggtcactcaagagctgatggatgaatcttaatttcagttgaagaaaaaaactctgatggagatgtacaaggagatgaatgttgtttgcatgcctgctaacacaacatccattctgcagaccgtgggtcaagaagtaattttgactttcaagtcgtgttatctaagaaacacatttcataaagccatttctcccatagatagtgaatcctctgatggatcggggcaaagtccattgaaaacctccatgaaacagttcatcattctaaatgccattaagaacatttgtgattcatggaaagaggtcaaaatatcagcatgaacaggatttggaagaagtggattccaaccctcatggatgactttgaggggttcaaaaattcagtggagaccaggcacatgacttatgcctataatcacagcattttaggacctaaagtgggacgatcacttgaggccaggagtttgagaccagcctggcaacatagcgagactcccatctttatttttaaaatatatattaataattcaatggaagtagtgactgcagatgtagcagaaatagcaagacaactagaattggaagtggagcctgaagatgtgactgaatttttgcaacctgctggtaaaacttgaacagatgaaatttttttttaattaaaaaaatgttttaaatgaaagaccctttgagaagtgtctgttcatgtccttcacccactttttgatggggttgtttgtttttttcttgtaaatttgtttgagttcattgtagattctggatattagccctttgtcagatgagtaggttgcgaaaattttctcccattttgtaggttgcctgttcactctgatggtagtttcttttgctgtgcagaagctctttagtttaattagatcccatttgtcaattttgtcttttgttgccattgcttttggtgttttggacatgaagtccttgcccatgcctatgtcctgaatggtaatgcctaggttttcttctagggtttttatggttttaggtctaacgtttaaatctttaatccatcttgaattgatttttgtataaggtgtaaggaagggatccagtttcagctttctacatatggctagccagttttcccagcaccatttattaaatagggaatcctttccccattgcttgtttttctcaggtttatcaaagaccagatagttgtagatatgcggcgttatttctgagggctctgttctgttccattgagaagacatttatgcagccaaaaaacacatgaaaaaatgctcatcatcactggccatcagagaaatgcaaatcaaaaccacaatgagataccatctcacaccagttagaatggcaatcattaaaaagtcaggaaacaacaggtgctggagaggatgtggagaaataggaacacttttacactgttggtgggactgtaaactagttcaaccattgtggaagtcagtgtggcgattcctcagagatctagaactagaaataccatttgacccagccatcccattagtgggtatatacccaaatgactataaatcatgctgctataaagacacatgcacacatatgtttattgcggcattattcacaatagcaaagacttggaaccaactcaaacgtccaacaatgatagactggattaagaaaatgtggcacatatacaccatggagtactgtgcagccataaaaaatgatgagttcgtgtcctttgtagggacatggatgaaattggaaatcatcattctcagtaaactatcgcaagaacaaaaaaccaaacaccgcatattctcactcataggtgggaattgaacaatgagatcacatggacacaggaaggggaatatcacactctggggactgtggtggggtggggggaggggggagggatagcattgggagatatacctaatgctagatgacgagttagtgggtgcagcacaccagcatggcacatgtatacatatgtaactaacctgcacaatgtgcacatgtaccctaaaacttaaagtataataaaaaaaaaatagaaaaaaaagaaaaaataataaaattacaattcatgtttccataaaaaaaagaaagacctcatgaagcgggcagatcacgaggtcaggagatcaagaccatcctggctaacacggggaaaccccgtctctactaaaaatataaaaaattggccgggcatggtggtgggcgcctgtagtcccagctattagggaggctgaggcaggggaatggcgtgaacccaggagacggagcttgcagtgagcagagatcacgccactgcactccagcttgggcgacagtgctagactccgtctcaaaaaaaaaaaacttgacctgatgaggaattgcttcttatggataagcaaataaattgtttttttgtttgtttgtttgttttttgagactgagttttgctcttgttgcccaggctggagtgcaatggcgcgatctcagcttaccacaacctctgcctcccaggttcaagcaattctcctgcctcagcctcccaagtagctgggattacaggcatgcaccaccacgcccggctaatttttttttgtatttttagtagagatggggtttctccaggttgaggctggtctcgaactcctgacctcaggtgatccgcccacctcggcctcccaaagtgctgggattacaggcgtgagccaccgtgcccagccttaaagtgtttttttaaaggtactcaaatatgtcaattttattgtttctctatgtgcacatttatttgctactgaaaattgcaaaagcagtacatcatggcttcttattgcaatgcatcctcccacctcagcttcccaagtagctgggaccacaggcatgtgccacttcacctggcaaatttttttgaaaaatttttttgtagagatggagtctcgccatgttgcccaggctggtcttgaactcttagcctcaagcaatactcctgccacagcctcccaaaacgctgggattacatgcaatagccaccatgcctggcctacttcaagttcaaaaatttaaaccaaccttcatcccagtgtcttcacaaatgctcagcaaagaaaattcctaagacaattcagggacctctcataaccttactgagagacgttaataaagaaccttagtaacttgactctcaactctactaccaacccttcccctctagcagaagtttcaccccaacaacaggatagaagagaaacaatcttccaggacatcagagatggcttgccttacaggaggaaattagtaagaacattgctctctgtggggaaagaaaggatggtaaaaatcgagatacctattaatagattttctcagcttgaaagagaactgacactaggcttaagggagcgcagaatgaatcaagaagtgaaccattcaaatgtggctgcagtttttgtgtgtatcacagatgggatccttctgagaatgctagaaaagggaattatgacacagagcctattcagccataaacattatttttgtactttttctttcttgctggtaattttttcctattcttttgagatggagtctcactctgttgcccaggctggagtgcagcggcatgatcttggctcactgtagcttccggctcctgggttcaggcagttctgcctcagcctcccaagtacctgggattagaggcgcccaccactacgcccagctaatttttatattttgagtagagatgtggtttcaccatattggccaagctggtcttgaactcctgacttccagtgatccacccgcctcggcctcccaaagtgccgggattacaggtgtgagccaccacgcccagccttcttgctggtaattttttatatagtgggttaagaaagctactctatgctaggatagactatcgcaatatttttgatatctttttctgtgatatctttttctcatacattttccttcctacaatgacactggtaacttataaggaatctgtgtagtttgaatgtatttgaataatttcaatataccttagtgctactctttgatttaatccctaaagcaccaataggtcctaaatattctcatgtgttttagaagcctgaagtcagtgagaaaaacccacagagagcaatgtttttactaatttcctcctgtaagtctagccacctctgatgtcctggaagattgtttcttttctatcctgttgctcgggtgaaccttctgctagaggggaagggttggtagtggagttgagagtcaagttactaaggttctttagtaacatctcacagtagagggtatgagaggcccctgaattgtcttaggaattttcttcagtgagcatttgcgaagactcggatgaaggttaggttaaacttttgtcatgggtccattggcaggctagtcacaagtgcctcctggatctttgggtcctggcggaaaacgatgccagactctcaaattgccacaaggtagcctggaaagaacgccacagtccagaaggagcctcgaaagtggtttcatgaggtggaatttactcctggtgaagatgctgtgaacgctgtttaaactacaacagaggatttacaatattgacgcacgtagttaagaaagcagtggcagggtttgagaggattggctccaattttgaaagaagttctattatgggtaaaatgctatcaaacaacatctcatgttccagagaaatctttcgtggaaggaagcgtcagttaatgtggtaaatttcattgttgttttaacaaattgttacaaccacttcaatatttagcaaccaccacccttatcagccagcagccaatgacattgaggcaagactcctcaccagcaaaaaagattacgactccctgaaggctaagatcattattagtatttttagcaataaagtatttttatataatttctttttaaaaaataatggagcttcaaataagggcatcaggtattttttcttttaatagatggggttttgccatgttgtccaggctgagctcaagcaatccacctgcctcggcctcccaaagtgctgggattacaggcgtgagtcaccccacccagccagcatcaagtgttttaaaattaaagtatgtgccttgtttcctagacataacaccattttacactttattagactacagtgtagtgtagtgtaaatgtaacttttttttttgagagggagtctcgctcggccacccaggctggagtgcagtggcgcgatcttggctcactgcaagctccgcctcccaggttcacgccattctcctgcctcagcctcccgagtagctgggactacaggcacctgctaccatgcccggctaattttttgtaatttttttttttagtagagacggggtttctccacgttagccaggatggtctcgatctcctgacctcgcgatctgcccgcctccgcctcccaaagtgctggtattacaggcatgagccaccgcgcccggccataacttctttttttaaatagagacaggatctccctatattgcccaggttgacctcacaactcctggtctcaagtgatcctcccccttccatgtcctaaagtactgggattataggcatgagccaccacacccagccaatgtaactttatattcacaaggaaacaaaaccatttttgtgactcactttatagcaatatttgctttattgtggtgggctgcaacccaatccacaatatctttgaggtatggctgtactttctaagtgtttcctgagtcagcctactttttctccattttttggtcattattctatccggttttttttttgttttgttttgttgttgtttggaaacaagaacttgctgtgtcgcccaggctggagtgcagtagcacgatcatagctcactgcagcctcaccatccctgtgttcaaaccattctcctgcctcaggctcctaagttgctgagactacagatgcacactaccacacctggctcatttttaaaaaattgtttgtagagatggggtctcatcatgttgcccaggttgatctggaactcctggcctcaagcaatccttccgcctcagccttctgagtagccctgatcaatccattgttgaagaatacatggatgttactttgcagtctgtcatcctgaatttgtgttcacttgacattgcctaattattagtttcagcttacccactttttgtcactaacacgcagaagagactgtggccttcttactgtatcatatcaggaagcatctcacattggtttgtgccattactggtgcagtgactttcagccacttggttaaggtggagttggccatatttctctgctgcaaaattactgattttccttttgtaattaataagtgtgtgtgagtagattcttttgagatgaagtatatatcttgttcttccttgaacttaaaggtttttttttaagtgaaagcaaatttgttaagaaagtaaaggaataaaagaacggctactccataggcagagcagtgtcactttaaggttatgacgtcaagtgatttttgtacaaatcaataattactgtgatgattgaaaaaagattattaccaagtttattttcattgtctcaaggtcttctgaactctggatctaggctgtgtcaacagggtagtgtggtaccccctgtacccgtctctgcctcctacagtccttttcatttattttgtttttttataatagaggcagagtcttgctatatgttgtccaggctggtttcaaactcctgagctcaagcaatcttcctgccttggcctcccaaagtagtgggattacaagtgtgacccaccacatctggccaagtcctttaccatcttcagaaggcttagcttgcagtttcagcagaaggatagactcccaggaagaccgtgagacagatttggggtccagttgatattatcaagtacactgaatttgactgtgttcaccacgttctggctccagagaaatgagagtcactagtgaagttggtgccattttgtgtatcttctgcacctaaggaggaaaaaagatagaggaaagaatgtaagagatcagcttatattcacaaacatggacgtcagccttttcccaccttttctttttttttttttttagacggagtctcactttgtcgcccaggctggagtgcggtggcgcgatctcggctcactgcaagctccgcctcccgggttcacgccatgctcctgcctcagcctcccgagtagctgggactacaggcgcccgccaccacgctcggctaattgtttgtatttttagtagagacggggtttcaccgtgttagccaggatggtctcgatctcctgacctcgtgatccgcccacctcggcctcccaaagtgctgggattacaggcgtgagcctccatgcccagcccccaccttttcaatccaatatggaacctactacctcctgggaaagccatgcccccgctgcccctggcagaccacacctgaggattcattcctcctctcactcaatcacaccttcaacagaagtgtattgagcgtttcctttgtaccaggcactggggatacaacagtgaatttgtatccatggggttgctggaatccagttggaaagtgggcagtggattcttcagaaggttcataggcctgggaagagtctttggggactgtgagcaaccccatggtaccgtggagcacttgagtggggatatcctccacctcccaggaggagctgtcggctccaccatgacgaagcactggacatccaagggctccgcttgtgaaccacattggaaacaacaggctagttaccttgcagtccctcaggaatcttgccctgctcttcttgttctaaggacgccacaggttccctttttctctggagaagtaatctagatcttcgattttggaaccaaatctaagtggtaagacaaagaaacttaatttaaacaaagaatgttgtgtaaaactcatgattgctttcttctcttttttcttttctgttttttgagacagcggtctctctcagagtagctagtgccacagctgtgcatcatcaccttaggctaacttttaaactttttgtagagacgaggtttcaccacgtggcccaggctgatcttgaacttctgagcacaaccaatcctcccaagtagctgggactagaggcacacttgactgtgcccaacccaagatagatagatagatagatagatagatacttttttttttaatacggagtctcactcggtcacccaggctggagtgcagtggcacaatcttggctcactgcaacctccacctcccaggttcaagcaattctcctgcctcagcctcccaagcagctgggattataggcgccaaccaccatacccggctaatttttgtatttttagtagagatggaatttcaccatattggccaggctggtcttgaactcccgacctcaggtgatccacccacctcagcctcccaaagtgctggcattacaggcgtgagccaccgtgcccggcccaacattattaacattttatgacatttgtgagagtctataaggcctaaagagaacacccaaaattctgaaactcacacccagtccctttgtgataggttttagatcctgaaagttcacaggtccacctcattacaataccggtgtttctctaaagtgacatgctacattgcagctcttccttctgcctgaaatttttttttctatctctttttcttcccctcagaaatgcccattttacttccaattcccagaatagagaatgtctaggaaaacattcttcatcccacaagacaaacttaatttctgttccttctttgtgcccatagattatacacataggcatgtaaaacttatgcatatatactcacataatttgaaatagcagttcatatatacttgtacgcacacactcacaaaaatccctcaccttccagcagctactatatttttgagacaaaatctcactctatcgcccaggctagagggcagtggtgcgatcacagttcactgcagcctcaacctcctgggctcaagtgatgctcctgcctcagcctctcgcgtaactgggaccacagccatgtgccagcacacccagctaacttttaatttttttcatagagttgtggtctccctgttcctcctgcctcagcctctaaaactgctgggattccagacatgagccgccgtaactggccacaactctttttattttgagacagagtttcgcccttgttgcccaggctgaattgcagtggcgtgatctcggctcaccgcaacctccgcctcccgggttcaagcaattctcctgcctcagcctccggagtagctgggattataagcatgcaccaccatgcccagctaaatttttgtatttttagtagagacggggtttctccatgttggtcaggctggtctcgaactcccgacctcaggtgatccacccgccttggcctcccaaagtgctgagattacaggtgtgagccactgtgcccagccacaactcttaatagtgtgaaaatggcagttaagtttcaacattggttttggaggagacaaacattcaaaccatagcaatcactacctagtacagtacctagcacatagtagatgctccgaataatgcaaaatgaaagaaggacagaatgaaaaatgaacacgagacgaggaaagtaaaacgaaagaaccatcagaactactaatgtgcattcatgtcctgcttacaggagggagcactggtttaaacgcacacacaccctacacagcagtctgacaattttattccatttcaagatgtgtcaggaatgaatcctcggacagactggtacatttctctgagctaaatgttaaatgtctaaagtggacctcataattttttttttcaagacggagtcttgctctgtcacccaggctggagtgcagtggtgcaatctctactcactgcaacctccacctcccagattcaagtgattctcctccctcagcctgccaagtagctgggacaacaggcatgagccaccgtgcccggttaatttttgtatttttgtagagatggggtttcaccatgttggccgggctggtcttcaactcctgacctcaggtgatctgcccacctcagcctcccaaagtgctggcattacagacgtgagccaccgcacccagcctggacctcataactctaacctcagggcataattagaagatctgaaggatacagtagacataaagacttcagtcaaataggccgggcacggtggctcagccctgtaatcccagcactttgggaagccaaggagggtggatcacctgaggccaggagttcaagatcagactgggcaacatggcgaaaccctgtctctactaaaaatacaaaaaatattagccaggcgtggtggcacacacctgtaatcctagctactcaggcagctgaagcacaaaaaccgcttgaacctaggaggtcgaggtggcagtgaggcaagatttcgccgctgcactccagcctgggtaatagagtgagaccccatctcagaaaaaaaaaaaaggctttagccaaatgcctggcttatatgcaatgttaactaatattcactcactcaacaacttctcattgggtgtcacgtgccacgcactgttcagggcccaaggaatacaacattgctcaagacagacagaaaataccagaaggggatgtgagattgagtcctgtgggcacctgggggtagaagccagcagacagggaacagctgtgaaagaccctgaaatgtgcccagcatgatgaggaactgcctgaggcccatgtggcttcccttcctgtatacctagatccctaggagatgggacaaccaccttcttatcactcacttggactcttgactctggaacaccgatttctttagcaagttcttctctggaatcaatcccaggatatgggtttttcataaatgccttgatgagagtgtgtaactgagaggcgctgtaggtggtacgacaccgtctggcttctctacctagggaaggcatggaaagatggaggggggcggtcaaggaatattgcaagggtccattcacatattcaaacacagaacccaaacttgtcactctccctccaatttcgatcccactgactcctcctgagaggatcttgtcccaggttccttccaggtggaaggttctagaggagacccaggatgatatgtctgggcttctggactccagtagaaagaaagtaggcaagaggccgggcgcggtggctcacgcctgtaatgccggcactttaagagactgagagggggcagatcacaaggtcaggagttcaagaccagcctgaccaatatggcgaaacctcgtctctactaaaagtacaaaaattagctgggcatagtggcgcgcacctgtaaatcccagctacttgggaggctgaggcggaagaattgcttgaacctgggaggcagaggttgtagtgagccaagatcaagccactgcactccagcctgggtgacagagtgagactccatctcaataaataaataagaaagcctgggaagagggcaggggagaacttctagggtacgatgaaccctttgccaccataagaccctgaacaggaggtcatcagggaggagacattcttttttcaaagtcgcagttggctccgccgtagagaagctctgctggggaacagaactaagagggttatttactttgaaactccacaccaggttgatcttgcccctggctctggcttgattctaaagtctcagcttctggtcttttctggaatccgtgcctagctcttcgattctgaaaccaaatctaagtgaggaaaagaaaaggagagaattacgtgttaatgtcatttaagctacatcactgcctgttcccaaagtgagcaattcttattgggcctaggcccaggattattacttacttctgtcacattctaccaagtccttttttttcttttttgagatagagtctcactttgtggcccaggctggagtgcagtggcgtgatctcggctcactgcaacctccacctcctgagttcaagtattctcctggctcagactcccaaggagctgggattataggtgtgtgccatcatgcctggctaatttttgtattttcagtagagatggggtttctccatgttggtcaggctggtctagaactcctgacctcaggtgatccacccacctcggcttcccaaagtgctgggattataagcatgacctaccacgcccagcccatctaccaactctttggtcaagacttggcattcacacccagggcaacattgtgtgacaccataatctctactaaaaacaaaaaagttaaaaaaaaaaaaaattagccggccaggtgcagtggctcatgcctgtaatcccagcactttgggaagccgaagcaggcagatcacgaggtcaggagttcaagaccagcctggccaacatagtgaacctcagtctttactaaaaatacaaaacaaaattagctgatcatggcggcaggcgcctgtagtcccagctacttgggaggctgaggcagaagaatcacttgaacttgggaggcgggggtttcagcaagccaagatcacaccactgcactccagcttggacgacacagcgagactctgtctcaaaattaaaaaaaattagctgtggtggcacatgcctatagtcccagctatctgggaagctgagggagggttgcttgagaccgggatttcaaggcttcggtgagccttgattgtgcccctgcactccagcctgggtgagacagtgagaccctgactcaaaaagatgaaaacaaaaataaaaataaaagattgggcattcagcatcttcacaatctgctgccaacatgatttgctctaattattaatatttaattggtaaatagctgctacaattattacatgtttaaaagccagctcaagtatctccttctctgaaggtacgcctacacgtgttctctcacctcctgtgagctcgctcatcctcagtatccacatctgtgaagtgaggctaagaccaacaccttcgtgggtttattgagggtcagttgagatactccctaccaagccctcagcacatgggtacatagtatgggctccgttaatggttctctctcctgcctttttacttccagtcctggagatattgaactttaacttacctggattctggactcttctgtattgatttctaaagcaagtttttgtttggtagcataacctgggtaaggcttttgattgaaggtattgatgaggattttcaactgttcttctgtgaattttgtgcgacagcgcctatgatttgtttttaccatctctgtaggaagattacaaaagaagaagcatgtaataggttaatttatatactcaaacttcaggttcaagctagtctctcacttcctcttcccaaatccactggaatccactccaggagaactaccctcatacaagtatggagctcttgaacacacaatggcgatttttcaacttctttagctcatctgaatgccatactaagaagtcagggatcctctgttttgaaaaaccattaaaaaccattgtgagccgggcatggtggttgacgcctgtaatcccagcactttaggaggtcaaggtggtcagatcatgaggtcaggagttcgagaccagcctggccaacatgatgaaactccatctgtactaaaaatacaaaaaattagccagtcgtggtggcgtgtgcctgtaatcccagctactcaggaggtggaggcagcaaaatcgcttgaacctgggaggcggaggttgcagtgagccgagatcgtgccattgcactccagcctgggtaacagagtgagactctatctcaaaaaaaaaaaaaaaaaaactgggcgcggtggctcacacctgtaatcccagcactttgggaggccgaggcgggcggatcacaaggtcaggagatcgagaccatcctggctaacatgatgaaaccccgtctctactaaaaatacaaaaaattagccgggcgcagtggcgggcacctgtagtcccagctactccggaggctgaggcaggagaatggcgtgaacccgggaggcggagcttgcagtgagccgagattgcgccactgcactccagcctgggtgacagagcgagactccgtctcaaaaaaaaaacaaaatgaagtaaaataaaaaataaataaaaataagaatatgtatgtcatgaaaatgccaataattttttttaaaaaacaatgtgttctgttcatatggattagaaacaatctaagtcaagaatgcatgcaatatgtcattgtagtgatgaaaccatagaaacgaagagtttgtgatacaaggaccatttcaacccctttcagtttttcaggtcaaaattccttggtattttatttttattggcatatattttatttttattatttttattttttcaggcaggatctcactctgttgcccaggatggagtgcagtggcgcaatcatggcacactgcagctttcacctccacaggctcaggtgatcctcctacctcagcctcctgagtagctgggactacaggtgcacacccccacacccagctaatttttctactttttgatagagtttcgccacgttgtccaggctggtctcaaactcctgggctcaaaagcgattccccagccttggcctcccaaagtgctgagattacagatatgagccaccacccctggccggagcatattttttttactttgacctccattgctcaatagcaataacaggcaaacagtaacagtttccaaggtatttttaaaaacaccacagggaggacaaaattagctggaaaaagaatttcatactttcagtggaattttccaataggaaaaaaaataccacatcacataatttgctggataggacatctccttgaaataaccaaatctggaaagcattttggaagataccatttcgtaacagaattagacttagtgaattgagataagaagaaaatttactagagatgctagaagttcagttaaaagaccaacagcttttttgtttgatctttgaatgcttgcccttgtcttcagtttcacacacctggtccattgttttgttttttgttttttgttttttgagatggagtttcactcttgttgcccaggctggagtgcaatggtgcagtctcggctcactgcaacctccacctcccagattcaagtgattctcctgcctcagcctccaaagtagctggggttacaggcacgtgccgccacgcctggctaattttttgtatttttagtagagacagggtttcaccacgttggccagactggtctcgaactcctgacctcctgatccacccaccttggcctaccacattgctgggattacgggtgtgagccactgcacctggcccctggtccactgtatttcactgaagggggaagtttcaacttttacaagctcaatgaattggctcatacaatccacctttgacattacccatcattcctcttgaaccttgacctcatcatacgcgacattccataccttgacctcatctccttgacctcatcatacgcgacattccacttggctttatatgttgcaatgtgtactcctgccatgatatctaacttccatctgacccccaacccggccaacttcttccttctccagagttttcacttgctcctccgtctacccacaaggctcttcacacgatgatggatgagatcaccttgctcaggtctcagcttgcacaccatcttctcagagtccctccctgaccctccggtctaaggcagtccacaccccatgctatgacctctcactttaccaccatgcttagctaagtttttgatgttttgtagagatggcctttccctaggttgcccaggctgtatgagactcctggcctccccatacaatcctcccacctcagccacccaaagtgctggaattacaggaaagagtcacatcctctctcttttttttttctttgagacagagtctcactctgttccccaggctagagttcagtggcacaatatcggctcactgcagcctcagtctcctgggttcaagtgattcccctgcctcagactcctgagtagctgggattacaggcacctgccaccatgcctggctaatttttgtatttttagtggagacgtggttttgccacgtaggccaggctggtctggatgatccacccacctcagcctcccaaagtgctgggattacaggtgtgagccaccatgcctggccaatttcttaaacttgtttaaagggtagttgtcacatggagtctgaaaacatatcaatgaacttttcttactgcgttatattaaaatacatttttgtcttacatttttttcaagtttccaacccattatcttacattttgaatggctcttttacctatcgatgattttgtagcctcttgcattgatcatttaaaataacagtttagactgggcgtaggtggctcacacctataatcccatcaccttgagaggccaggacaggtgggttccttgagtccaggagttcaagactatcctgggcaacatagtgagacaccatctaactcattctacaaggccagtattactctgatactcaaaagcaggcaaatagacacatcgaaaaaggacaatatccctaatgaacactgatgcaaaaatcctcaacaaaatactagcaaactgaattcaacagtaaaaagataattcctcatgaccacatgggatttatcccacggatgcaaggatgcctctgtaccccatacatatatacacttactatgcacccacaaaaattcaaaatcattggccgggcacagtggctcacgcctataatcccagcactttgggaggccgaagcaggcagatcacctgaggtcaggagttcgagaccagcctgaccaacttggagaaaccccgtctctactaaaaatacaaaattagccaggcatggtggtgcatacctgtaatcccagcaacttgggaggctgaggcgagagaatcgcttgaacccgggaggcagaggttgcagtgagccgagattgcaccattgcactccagcctgggcaacaggagtgaaactccgtctcaaaaaaataaaattaaaaataatttttttaaaaaaggctagatgactgtaggattttggtggaaacaaaaattttttttaagataaaaaatatttcaaaataataaaaatgtgaaaggctagttttatgctagcaattcaaataattacatacatccttcttttccagacaagcatcctattccagtatgaagcacagggtttgatgcatatgtccctttgtgttacacaggatattaaaaaggtgtaatcaagggttaaagtttaataaaatcaataattgttactgcttaaggacattcctaagtgaaaccactttttgttcttgcactgaaagtatgagggtaaccacagtaactaccagtacaatttggttatactggtttgatgtcctctgaggtaccagcagatttacccatcattgtttttgtatcatcagtgcaaaagaaaaatgtcttagtataattaggaaaattgtgtcaaccttacagttcctggaaagggctctggagctccacaggccatactttgaaaacaagtgccctaaaataaatcttctattcttccgtatatttgtaagtaacaccacccctttcaaaagaccacttcataagatttacatagacctgccctgataccttgagaaattgatcctctctgcttttgtaattaacctcagaaagccactcctaaatccattttgcttttcctcaacttctacatttctggagtaggaaaaaaaaaaaaaaaatatatatatatatatatatgtatatatatatattcattcttttgactgaattctaatttctaacactttaccttctccacacaacaaacattcacttccagaaatggctaggtaagtcctagtagaattaaccagaatattttcatctaatttttcaagtgttaaaaaattattaacgcctattaaaagccagaccctggccgggcacggtggctcacgcctgtaatcccagcactttgggaggccgaggcgggcagatcacgatgtcaggagatcgagaccatcctggctaacacagtgaaaccccgtctctactaaaaatgcaaaaaattagccaggcgtggtggcgggcgtctgtagtcccagctactcgggaggctgaggcaggagaatggcatgaacccgggaggcagagcttgcagtgagccgagatcgcgccactgcactccagcctgggcgagagagtgagactcctctcaaaaaaaaaaaaaaaaaagccagaccctattctaggcaccataaacaaaacagttaagatatccttgatctttaaggagctgaaagatatcaagcaaacaagcaaaagatgtagtgtatcagatgatgagtatttccacggcaaagaagactcaagtggcaagagtagagagtgcaggggtgaggtcacagttctaagtgcaatagttagggatgggctcactgagaaagtataacatgaacaaaggcttgaggcacattagagagtgagtaatgctgacgtttgagagacattgcaggaggtggggagaggccctgggctgggacgctgcctgtcctatttgacataaggcaaggaggccagaacatctgaaaaaaaagaataaaagggaagcagacgaggtcacagaccataccaagcgccacgttatctagggcacgatagggccaagtgcctttttgttgaaggttttgagcagataagtgacataatttaatttatgtatgtatgtatgtatgtatttttgagatggagtctcgctctctggcccaggctgaggtacatggcatgatcacggctcactgcaacattcacctcttgggttcaagcaattctcctgcctcagcctcccgagtagctgggactacaggcgcccaccaccacgcctggttaatttttgtatttttagtagagacagggtttcaccatgttagccaggctggtcttgaactcctgacctcgtgatctgcccaccgcggcctcccaaagtgctgggattacaggcgtgagccacggcgcccggccgccataatttaattaacagtttaacaacatcacatgaggtacagcgttgagaataggttggtggaagcagggagatcagttaggagaagactgcaataatctcatgcaatgggccaataatctaatgagatggaccaagaaatggtcagattccttaaatatttgaatgttaaagccatcagaatgtccagcctgactgtgttatgggggaaaaaatggagtcaggggtgttttctagatatgaggcatgacctggcacctcctgagctggagaaaacagtgcgaggaatagtttagatatgaacatagggaattcagtttttggaacacattgagtctgagatgcctgttagagacaagcaggcaattagatgaagtccaaagttcaggagaaaagttcaaacattctgtagagagaaatcaggaaagtgctttccagatctggaatccttgattccaaggatattttgagctctgaactttgtgatgtgtcccatagttgctctgttttagcatctgtctccctctcctttttttcttttccactccttcctcctctcttccttcctgaagctcaaatatgtcttatttagttcttgaatatctgtacctttctgaaattcccaatgctcaaatgcactgaaaacagcctattttcataatatcacatcagagaaaccggttttcccctatccagatacagttaaagtttaaaaatggaactctcacaacttctgacaagaccactgggtttttagccctactttttccccaaaccaacaaaagctcagtcaagcacaagggaacttactgtgtgaataggtgtcttcggccatgctggaagagagtcctgaaggctgagccactgtctgggagacaagtcactctgcgcagagactgggttttatatgcgtagccaggtggtcccgcccacttttttaaaccatttacataaatctctagttccacccttagtaattgtatcactccttagaaacatgtatcctccatctaaaaaggactagataggacccctttccgtcaattgatatttaataatttacaccagtgtataaattattaccaacccctacacctaagccatcacaagaagaacatttcggcccatgccaactcacatacacagagtcatgctccttggctcccccaacccccttgtgggaaaaaaattcgtcccaaatcactggaacctgaacagggagacaagcttgcaatagttgccaattttttaaaaaagaatatttttgagtactattctgcttacacatatttttcaatgcttattatatacatatagtcttttgtaaatggggtttttatgctctccacctatcttttgacatagtggcctctccttataaattaaaagtgttatttctaattagtatcacataagagtgaggctagtgagacaggaacaaaatttaaggtggtgctaaaaattctgtgatcaagataaatagtatttgaaagcaatgtatattttaagtaatgtaaaaagtccatcttaacaaaacataaagattgtaaataaaaagaagatcccaccctgcacgtgcacgaccctgcaagttatgcaagtgagggtacctgcgcattgaaaaaagatgtctcaccattgaccagtcattgatcagtcattgatcagtcttgagggaagctggctggtggctgtcactttttatagctgtaatctacaatagtgcaggataaaagggaaaattttattacatgtctatatttgtgtaattttttaactgttattaagagcacataaagaagtgatatgaatttcatttattgatatatttgactatccataaataaaatttggccagatatcaagccattttggagaaacaatttcgaaccaggaaaatgacatgaaataacatttaacaggaaaattttacactttatttaattaaaacaatgataaattgtttttcttttctgtatatgacatttcatcacaatattttttcaccaaatttgtctggaaatctagagcagaattttctgctgtttgtttatattgatgtttatattttgatgtaaattatatgtacatctacttgaacattagtattacaattataaatgtgctttaaattaattgacacaatattggatattcattataattatattatcattaaatatattatattaatatataatattaataatataatcttgatataccatataacagatatattacatattatatttactccagttaaatattatatttactttttagctttattgaggtacagttgacaaaaatgatatatatttaaatatacaatttgaattttgatatacacatataattgaatcccagattcaattaccataatcaaatcaagctgattgatgtatttaccacctcaaaccacaccctttgtgtgtgtgtacatatatattacattatattatatttactccaattattgtatttactttttagctttattgaggtacagttaacaaaaatgatataaatgatatatattttaaatatacagtttgaattttgaaatacacaaaagatataattaccataatcaaatcaagctgattgatgtatttaccacctcaaaccacaccctttgtgtgtgtgtacatatatattacattatattatatttactccaattaaatattgtatttactttttagctttattgaggtacagttgacaaaaatgatataaatgatatatattttaaatatacagtttgaattttgaaatacacaaaagatataattaccataatcaaatcaagctgattgatgtatttaccacctcaaaccacaccctttgtgtgtgtgtacatatatattacattatattatatttactccaattaaatattgtatttactttttagctttattgaggtacagttgacaaaaatgatataaatgatatatattttaaatatacagtttgaattttgaaatacacaaaagatataattaccataatcaaatcaagctgattgatgtatttaccacctcaaaccactccctttgtgtgtgtgtacatatatattacattatattatatttactccaattaaatattgtatttactttttagctttattgaggtacagttgacaaaaatgatataaatgatatatattttaaatatagtttgaattttgaaatacacaaaagatataattaccataatcaaatcaagctgattgatgtatttaccacctcaaaccacaccctttgtgtgtgtgcatatatgttacattatattatatttactccaattaaatattgtatttacttttttttttttttgagacagtgtttcactcttgttgcccaggctgaagtgcagtggggtgatctcaggtcactgcagcctctgcctcccagattcaagtgattctcctgcctcaggctcctgagtagctgggattacaggcatctgccaccacgtctggctaattttttgtatttttagtagagatggggtttcaccatattggccaggctggtctcgaactactgacctcaggtgatccacctgcctcggcctcccaaagtgctaggattacaggtgtgatccactgccctgggccttgtatttactttttagctttattgaggtacagttgacaaaaaagatacatattttaaatatacgatttgaattttgatatacacatataatatgatatggttaccataatcaaatcaagctgattgatgtattaaccacctcaaattataccctttgtgtgtgtgtgtgtgtgcggtcagaacactttttaaaaaaaatatccttttctcccccatgcagaagaacacttaaggtctatccttgtcgcaaaaaataaaaatctatcctcttagcaaatgtcaagtagtattgtttttttcatttctgatcatccaatttaaaatttttttttctaatttgttaactatgtcacataatgtcacaatgtacatgtcaaataacgtcactatgtaccttaaatccccaaaacttatcttgcaaaactgaaaatttgtacttcttgaccaacatttccccatttccccttcactcaagcccccggcaaccaccattttactctctgcttctatttttgatccaacctcactgtttgtgtccacgctccttaattttcttggtcatgagaccacgagcttagataacaccttagacaatgagaccagtgaccctgacctgtttcagtttagttatttaaaatatttttctttcttttttaaattgtatttatttatttatttgttttgagagggtcttgctctgtcgcccaggctggaatgcagtggtgcaaccatggctcactgcagcctccgactcctgggctcaagcgatcttaccccctagggctccaaaagtgctctgacagtaaatgcatgagctaccatgcccagccatcaaattttcaatcattataaatcttagagctggaaataatatctcattgttttatttttaatttgagcgctagcgtgcttgaacacttttaatcaaatgtatttgccatattttatttttcttttattagctttcagattctttgcttctttcttaggtagaacatttctttgagacttaaatattatgctgcatttgtcctatgtcctgcaagtgttttcttaattcagtattttaaaataatattttgtttttatgttttttgtatctttatagcattcttctaaattggatctatgtttattttaattgtctagtcaaagtactgacaaggaggagtgaacttcctgaaaacggagaacaagatgtgatgccttttagtaaatgtttaccaaaagacacaggattccatttccaattccatatcgagaacctttaaaattgtacataaaaatgcaggtgaagtcgtggagaagggaggccaacagtgcacacaggtagtgcctctggggaagaatcagaagtcatcctgcatcctaaattcctgacctgacttttctgcagggcgagtatctgacctgtgctacaccatcagcaacacaaagaaaacttgatgagcttttatttccttttatttgtatgtttcactccagttttcaattccgtgccctcaaaagcccggatatcatcaccggtacctcttttaagcttcacctctctgtgcggctccgcaagtatgttggtctccctgagagagtggggcctgcaacctgctgggcgcaggcgccttgagctgccacgtctgcccttttaccggcttgggtgcaggcaagggaaatgcgtccccgggccggggggcgcgagcgggggtccggggccgcgagctggggtccggggagcgcgagcgggggtccggggggcgggggccgcgggccgcgaggggggcgggggccgcgagggggcggggcgtgcgagggggcgggggcgtgcgagggggcgggggcgcgcgagggggcggggcgcgcgagggggcggggcgcgcgagggggcggggcgcgcgagggggcggggcgcgcgagggggcggggcgcgcgagggggcggggcgcgcgagggggcggggcgcgcgagggggcggggcgcgcgagggggcggggcgcgccgggctcgtcctctccgcggcgctcagtggcagcagggagggccggtgagatgccagagcaaggtagggtcctgtatttggggaccgctgacgtttgggtccccctcccgcggctgttagcgctgcgtggcccgagacctgcggtcgggcggggattaaggctgctttccggagggccccggccgcgtggtcgccctgccagagcggttgatgtcaggcagtgctgggaggcgttgctctccgggttcgcttctctcctgttgtcctaactctgcatctctcccgggtgaatcacagagctgtaaactaaaaatcaaattctaagctcccagccaactgaatggacccctcctctcagctaagagcatggcaaacttaaccggaaacactagttcggccgcgataggaaggagatgggacatgcctcattttaccctcctctctttgaaattcaggcacaggtcgggcgcggtggctcatgcctgtaatcccagcactttcggaggccgaggtgggtggatcacatgaggtcaggagttcgagaccagcctggccaacatggagaaaccccgtctctactaaaaatacaaaaattagccaggcgtggtggcgggcgcctgtatcccaactactcaggaggctgaggcaggagaattgctttaacccgggaggtggaggttgcagtgagccgagatcgcgccactgccactccagcctcagcaccagagcaagactacgcctcaaaaaaaaaaaaaaaaaaaaaaggaattcaggcacagctgaccagtattaacattaaaacaatttttttttagtatcttcatgctaaaggggtaagtagaaattgcatgtagcctcccatcagtttattccaaatagcaaacatttaccaagccctgagttattaactacgtattttctttttgtaaaccttacaattgagcaggcaagtaataacattatctccatatttttaatgtgaggaaactgaggcccaggaagacgtgtaatttgcccaatatcaggtattcagtatattggagatttgaaggacaagttatttattttgaaaaatgtataccttttccaaagttccaacaataattcaatgaacacatttattttgccccagaattgccaatgatgttatgtcctataaggaggcacctaagtatacagtttgtccatttgggagatttggattttgactacttggttaagatggtatctactagatctctccactctttcttctttgtaattaataagtaatctgtgggtcaattctttgcaatgtctgaataatattaagtccccccacttcagcctctagttttagcctctgttgatgattcttccctgaatctgtgatcactgcttgtggggattctatttctattacttctttacattttatacttataagttgacactcctgtaaagaactttacccatcccattcttttttcttttctttttttttgtttttgagaaagagtctcactcttgtcatccgggctggagtgcagttgcgcgatctaggctcactgcagcctccgcctcccgatttcaagtgattctcctgtctcagcttcccaagtagctgagactacaggcgtgtgctaccacacccagctaattttgttttttttgggttttttttttgtttttgtttttgtttttttttagtagagatggggtttcaccatgttggccaggctggtctcaaactactgacctcaggtgatccacccccctcggcctcccaaagtgttgagattacaggcgtgagccaccgcgcccggcccacctcaggtgatccacccctctcagcctcccaaagtgttgagattacaggcgtgagccaccacgccgggcccacctcaggtgatccacccccctcggcctcccaaagtgttgagattacaggcgtgagccaccgcgcccggcccacctcaggtgatccacccctctcagcctcccaaagtgctgagattacaggcgtgagccaccgcgcccggcccatcccatcccatccattttaagttagttaattattttagaagccacatggagtggatgatttttatctgcggcattataatccatttatctcattgtattggtgctcacactacccagcattagcctctccaaactcaagtaggcttgactttcttatttctatcacagagctcctgaaacccttggaatttcctgtgtgttgaaatgtcttttgttatttttaatgactttttgatcacatctcagtttataccaatgagatggcttagggtggagaccctagacagcctcaagatgaagctggtcaccagaaagattagagagttggaactttcagtcctacccaccaacctctgtgaagtggaaagggtgggatggcttgacatgaagctctataaaaactcttggacaacaagattttagctttccagattgctgaacacattcagtgttcctggagagggcatggaagctccacacctcttctcacataccttgccctgtgtatcttttctgactgtttgtttgtatcctttgtgatatcttttattataaaacagtaaacataagcaaagtgtttccccgagttctatgagccattctagaaatgagttctagggggttgtgggaaccccaattctaatgtagttggtcaaaagcacaggccacaaccaggtgattgtgactggcatctgaagtgaagggcaattctgtgggacttagtcctcaacctatgggatgtgacacttccttcaagtagatagtgtcagatttgaattataggacacctactggtgtctcctggaaaactgggatggatgaaaaaacctccactcatttggtcacacaaatgttctgttttgagtgagttgaaagaaaagaacagttagtttttttgctttagatgtggtgtcagaaatgggatgttgaatgattgtgtaagagtgggagcacttggcagagaagtcaaagatggcggctgtagctgctgttcgctggctggggctctgcagcaggcttgaccagccactgacgggtcagccagcaggtctatgtgaacaagcacacagctgagattttattctggaagtgcaaccctctcaaatattgaaggaactgatataacagggattgaagaagtagtaattccaaaaaagaaaacttgggataaagtagccgttcttcaggctcttgcatccacagtaaacagggttcccacggctgtaccttgcgtgtttcaagataatccttacctcataccaacatcctcttcagaatctcgttcatttttactggcaaagaaatccggggagaatacggccaagttcattattaattcatactccaaatattttcagaaagacatagctgaacctcatacactgtgtttaatgcctgagtactttgaacctcagatcaaagacataagtgaagccactctcaaggaatgaatcaagctcagaaaagtcaaagtctctgtggacatgtttgatgagcttttgcaagcaggaaccactgtgtctcttgtaacaacatatagtctcttggatttattgtgttactatggtgaccaggagccctcaactgattatcagtttcaacaaattgaacagtcagaagaattggaagaggaaaataataagaggtctaggaggaaagctggtgatcaatttggagttacctggtgagcacaaaacaacgctgagagaatgttttctctaatgccagggaaaaatgcacattcctattgcacagtgatccgaggaatggtgaagcatcaagcttatgagcaggcattaaacctgtacactgagttactaaacaacagactctgtgctgatgtatacacatttaatgcagtgattgaagcaacagtattggtgataaatgagaaatttgaggaagaatggaataatatactggagctgctaagacaaatggttgcacagaaggtgaaaccaaatctacagacttttaataccattctgaaatgtctccgaagattttatgtacttgcaagattgccagccttacagattctatgtgaaatgaaagccatcagactagaaccctcgcttgcaacatatcaccatattattcagctgttttatcagcctggaaacccttcaaagggatcatctttcatcatctatgatataatgaatgaattaatgggaaagagattttcccccaaaggacctggatgatgataagctttttcagtcagccatgagagtatcttcatctctcagaaatctagaacttgcgtaccaaatacatggcttttttttttttttttttttttttttttgagagagagagtctcgctctgtcacacacgctggagtgcagtggtgcaatctcgcctcactgcaagctctgcctcccgggttcacgccattctcctgcttcagcctcccgagtagctgggactacaggtgcccaccaccacgcctggctaattttttttgtatgtttagtagagatggggtttcacagtgttagccaggatggtctcgatctcctgacctcatgatccgcccgtctcggcctcccaaagtactgggattacaggcgtgagccactgcacccggctacatggccttttaaataccagagacaactgaaaattcattggacctgataaacggcataattcctattattccatgttcttcaatttgatttgtctaatggaacgaattgatgtcaccttgaagtggtatgaggacctgataccttcagccttctttccccactcccaaatgttgatagatctccgagcattggatgtggccaactggctggaagtgattactcaaatttggaaagatagtaaagaatatagtcacactttctgcaacaacctgagagaagagatcctgacactcatggcaatggataagcacccaccagagcttcaggtagcatttgctgactgtgctgctgatatcaaatctacgtatgaaagccagcctgtcagacacactgctctgaattggccagctatctgtctcaactgtagagctgtctttttttttttttttttttttttttgggacggagtttcgctcttgtggcccaggctggcgtgcaatggcatggtctcggctcactgcaacctctgcctccgaggtttaagtgattctcctgcctcagcctcctgagtagctgggattacaggcgtccaccactatgctggctaatttttgtctttttagtagaaacagggtttcaccatgttggccaggctgtctcaagctcctgaccccaggtgatccacctgcctcagcctcccaaagtgctgggattacctacatgagccactgcgctcagccagctgtcctctttttaatggctgggagaatccaggaagcctggaaaatgttggggctttttaggaagcataataagatccctagaaatgagttgctgaatgagtttatggacagtgcaagagtgtctaacagcccctcccaggccactgaggtagtagaggtggctcagcttacctatttgtgagggcctcacccagagagtaatgactgactttgcaatcaaccaggaacaaaaggaagccctaggcaacttcactgcattgaccagtaacagtgatactgacagcagcagtgacagcgacagtgacaccagtgaaggcaaatgaaagtggagattcgggagcagcaatggcctcagcgcagctgctggaatcacacctgagagcgagatatgctaatatttaacactgttacaaagaagacaagatacagattgggtgaatttgttactgtgagatacagtcagtacacagctgatttatgtagatttaagctcctaatttgcaacttaataactgtctattaatacaccattaaaggtttagcatttaagtagcaacatggccgttttcaggccaggcgcagtggctcacgcctgtaatcccagcattttgggaggccgaggcaggcggaccatgagggcaggagatcaagaccgtcctggctaacacggtgaaaccccaactctactaaaaaatacaaaaaaaattagccgggcgtggtggcgggtgcttgtagtctcagctacttgggaggccgaggcaggagaatggcgtgaacctgggaggcggagcttgcagtgagccgagtttgtgccacggcactccagcctggacaacagagcgagactccgtctcaaaaacaaacaaacaaacaaaaaacaaaaattgccgtttacagacacatggtgaggtccatcgctcttgtcatcaggataagcctgcaacctacaatgttggtgcgctgacctcgtgctgccgtcctcgtgtgactgccctctccctgctgccgtcctcgtgtgactgccctctccctgctgctgggtcctcatgcgattgccctctccctgctgctgggcttctgcctttgttggcctgatgtgctgctgtgatgctggtccttcatcttagaaaggtgttcatgcagttttatcacaggtggtgttgggtcaatagtttcccaatttcaggatatttccatgtcagaaatagtgcatcttaggaatgactaaacaggatattgttggtttaggctgcacaactgataaaatgactgtaaataaatgttgtaataaatgtagaaaaaagagtgggaacacttataaatatttggaaattaaaatagtgcctttttaatttgcatttttagattttaaaaataattatagagttgcagaaattataaaaaatagtgcagagttctgtgtattcttcatccagcttattcaaatgatgacatatttatatagtacaatgttaaaaccaggaaattgacattgctacaatctgtaggccttatttagagttaaccggttctctacatctctcgtttgtgtgtatatgcgtacttctatgcaattttaattttttctttttctttttttttcttttttctttttcttttttttctgagacagagtctcgctctgtcccccaggctggagtgcagtggtgtgatctcggttcactgcaagctccgacttccgggttcaggccattctcctgcctcagcctcccgagtagctgggactacaggcgcccgccaccatgcacggctaattttttgtatttttagtagagacggggtttcactgtgttagccagggtggtctcgatctcctgacctcgtgatccgcccgcctcggcctcccaaagtgctgggattacaggcgtgagccaccgtgcccggctgcaattttaatttttttaatgaagctgtaaagggagacttatacaatagcataatatccattattagtagcaaagtaacagtgtaagaaacagtacatcagacttagtcaaagggcaaacaaaagccaagtttggtgatcagggaaaactctgcatccccaaatgcttattgagtaaaatgaaggcctaccagtcaaaacaccacattaaaccagatgctggaaaaaggatggtgatatggtttggctctgtgtccccaccgaaatctcaccttgaattgtaataatccccatgtggcaagggcagggccaggaggagataattgaatcatggggatggtttcccccgtactgttctgacgatggtgagttctcatgagatctgatggtttcataaggggcttcccccttcacttggctctcacttttcttacctgctaccatgtaagatgtgcctgttttaccttccgccatgattgtaagtttccccaggcttcccttgccatgcagaactgtgagtcaaacctcttttctttataaattacccagtctcgagtaggtcttcatagcagcatgaaaacagactaatatagatgccatgctcctctaataccaatgttgctctgtgcatgtgtctttgtctatgtaagaaagaactgaaactagaaaagtagaaccattacatttagatatgtcctggctgtagtttggatgggtttggagggctgacacgataaaagtaatctgacagatgagagtaatgggtttagaaaaataaatgtgttggctgggcgcggtggctcatgcctgtaatcccagcactttgggaggctgaggcacgtggatcacgaggtcaggagatcgagaccatcctggctaacacagtgaaacctggtctctactaaaaatattaaaaaaaaaaaaaaaattagctgggcatggtggcgggcgcctgtagtcccagctactcgggaggctgaggcaggacaatggcgtgaacccaggaggcggagcttgcagtgagccgagatcgcgccactgcactccagcctgggggacagagtgagactccatctcaaaaaaaaaaaaaaaagaaaaagaaatttgtttctaatgtgcaggtttaattagagtggaagatgtcaataaataaggttttagccagacacggtggctcatgcctataatcccagaaatctaggagaccaagacaggtggattgcctgagtttaggagtttgaaaccagcctaggcaacatggcagaaccctgtctctacaaaaaataccccccaacaaaaaaattggccaggtgtggtggtaggcgcctgtagttccagctaccctgcaggctgaggtgggaggatcgcttgagcctgggaggcagaggctgcagtgagctatgattgtgccacttcactccagtttgggtgactaaataaataaataaataaataaaatacaataaaataaagaaaagaaaagaaaaagaaggaagattttaaagataccattgagtagcctagagcgctaaactctgatctgcttctccttacctaacccttttgggttttttgtttgtttgttttttgtttttttgtttttgtttttgttttgagatggagtcttgctctgtcaccaggctggagtgcagtggcatgatctgggctcactgcaacctctgcctcccaggttcaagtgattcttctacctcagcctcccgagtagctaggactacaggcaggtgccaccacacctggctcatttttgtatttttagtagagacggggtttcaccatgttagccaggctggtctcgaactcccaacctcaggtggtccgcccacctcggcctcccaaagtgctgggattacaggtgtgagccaccgcacccggccaatcctttcttgttactttcctttaatgcagagtttctcaatcttggcattgagaatgggatggataatttttggttgcagtgggacatcctgtgaagtttaataactttaacagcatcactggcctctttttagtacataccagtgaggcaggataggtagtcaaggagtgaccatatcctggggacgcagcaaccagggtgtccatacaatcaacacaataagcctcagcattcgagtggtagttcagctcattcaagcaaagctttcttcagcagggaatttcacctgtaggaacatgtgcgctttgattttacctttcctcagacaccctttgctcattataatagtaaaaaacaggccgggcatggtggcttacgtctgtaatcccagcactttgggaggccgaggtgggcggatcacctgaggtcgggagttcgagatcagcctgaccaacatggagaaaccccgtctctactaaaaatacaaaattagccggcgtggtggcacatgcctgtagtcccagctattcaggaggctgaggcaggagaattgcttgaacccgggaggtggaggttgcagtgagctgagatcacgccactgcactccagcctgggcgacaagagcaaaactccatctcaaaaaaaaaagtaaaaaacacacccatgggtggcgatttaagatgttaatgagacatgtgacgtatgaacaagtgtgtacagctactgcacatgtgcacccagaggagcacccagaacatggttactagtaacacctctttcccacctcctcatgaataatcatggaagtctgccataaagggaatcccccagcaccagtctttgctgtctaatccttaggagcaccccagcctgaattctctctctcagggtgtattgtctatttttcacctaattttcaagatattctttttgctttacaataaattactctgtgctccatctcttgctgtgtgattcttatttaagttcttttaaactaagaagacaagaactgaggtatcacaacaccatcaacaccagtagcacctcccatcccgaatatatgttagtgaaaaatgtctctggattttgctaaatgatccctggaccatgacactgacccattgcttgcctggctccatcatgctccaggaggagtgcaattgagtctttgaggttgttagggcttgtaaagtttggaggctttaagttgtacctgcaccagttttggaggtggacacacacatttggggatgctaggactctgttcctcccccaacccccagacttttaaggcaccaaggaatataaatatcatttattattttccaggcaggtgccaagccctttttatttaatattccatacaaaatttgaaaaattaaaaacaacctaaagtggagatttctacctctactttttcagatgagaaaattgagaaatcaaaagttctgagactcattttttaaattgagctcatatgttttgagtgtttcttatgttgccagatgtcaatggagtttctgggatctgaggggatgtgggaaaaacatcgtttctttttttttttttttttttttttgaaacggagtctcgctctgtcgcccaggctagagtgcagtggtgcgatcttggctcactgcaagctccgcctgctgggttcacaccattctcctacctcagcctcccaagtagctgggactacaggcgcccgccaccacacctggctactttttagtatttttagtagagacggggtttcaccatgttaaccaggatggtctcagtctcctgacctcatgatccacctgcctcagcctcccaaagtgctgggattacaggcgtgagccaccatgcccagccgaaaaacatcgtttcttagttgagttataattaatattgagagcattaaatttatgtagaaaaatcatttttccttaaatcctcaaagataacaaacaagcataaaaatcatttatagatttagtatttttctgttaaaatcatttactcttctttgtttttgggtcagtgttcaattggtttatacctttgatagttgaaatttacttactgaatactgatatcatttgtgggtcctggtaaatatttcaaagttgtcgtacaaacaggacaatagattctctcaactcttcaaacgtctaacatgacagacttataagtcttttttcttcttttttttttttttttttttttttttgtagagatggggtctcgctatgttgccaaggatgatcttgagctgctgggctcaagggatcctctcaccttgaccttggcctcccaaagtgctgggattataggcatgagccaccacgcctagcctcttgcaaagtcttataatgtcgtttttaaactcttaagctgccaagtgtgggtggctcatgcctgtaatcccaacattttgggaggctgaggtgggaggatcacctgagcccaggagttcaagaccagactgggcaacatggcaagaacctgtctttacaaaaaattaaaaaataaattagctgggcatggtggtacacacccacagtcacatctacttgggagggtgaggtaggaggattgcttcggcctaaaatgttggctgggcatggtggctcacgcctgtaatcccagcactttgggaggccaaggtgggtgagtcatgagatcaggagttcgagaccagcctggccaacatggtgaaaccccgtgtctactaaaaatacaaaaaaattagccaggcatggtggcaggtgcctgtaatcctagctactcgggagggtggggcaggagaattgcttgaaccgggaggcagaggttgcagtgagccaagatcacgccactgcactccagcctgggcgacagagagagactccatctcaaaaaaaaaaaaaaaaaaaaaaaaaaaagtcaaggctgcagaaaactatggtcactccactgcaactacatcctgggcagcagagtgacctttaataaaataaaaacacccttgagctactctcgtaaacccagtaagacttacacatttaataaatcagattgtcttaagccttttgacatcctaaatataagcttatgcaaagcagcaacacacatgtaaaatataaaagtaacaaagataacttcaatacaattttttttattttaaaaattttttaagagttgggggcttgctctgttgcctgggctggagtgcagtggcaggttcattgctcactgcagcctgaaattcctgggttcaagtgatcttcccatctcagcttcccaagttttgaggattacaggtgtgagccaccatgctcagctcttaacaacttttttttttttttttttgagacaacgtctccctctgtcacccaggctggaatacagtggcaccatcacagctcacagcagcctcaacctcctaagctcaagcgatcctccagcctcagcctcctgagttactgggacgacagttgtgcaccaccatacccagctactttttaatttttttgtagagatggtgtctcactatgttacccaggctgatctcaaactcctggcctcaagcaatctttctgccttggcttcccagagagagtttttcagtccatcatttttcaggattgtgagccagggttccattagatcttattgagatatctcttgtgtgtctgctgtgtgccagacatggtttaaaagactagagatacaggccagggatggtggatcacacgtgcaatcccagcacttagagaggccgagatgggcagattgcttgagcccagaaatttgagaccagcctgggcaatatggcaaaagcccatctacaaaaataaaaataaaaattagccgagcatggtggcatagctgcatgtagtcccagctacttgggaggctaaggtggtaggatcgattgagcctgggagatcaagtctgcagtgaactgaggtcgcaccactgcactccagcctgggtgacagagcaagaccctgtctcaattaaaaaaacaaacaaacaaaaaaaaaacttaggatccagcagtgaacaaaatcatcactgacgcttaccctcatggagctaacattctggatgaaaagtcagaaataaacaataattataatacagaaatagacatgataagttaaccagtgctataacaaaaagaaggaaaaggagagtaaggtggatcagggtgtcagagtttggggagttgtttgcaattttcattagaatgatcaggaaacagcttatttagaatgtgacatagatcaaagtctatagggagatgaggggctgagccatgtggagattggggtaggaagtggatttcctgccacaggctttcaagcaagcatataatatccagggctgggtgctgtggctcacgcctgtaatcccagcactttgggaagccaacgtgagaagattgcttgaggccaggaattcaagaccagcttgggcaacatattaagacccccatctctattttttttaatcttttttttttttcttttgaaacggagtctcgctctgtcgccaggctggagtgcagtggcccgatcccagcttacttcaatctctgcctcctgggttcaagcgattctcctgcctcagcctcctgactagctgggattacaggtgtgtgccaccacgcctggctaattttgtatttttagtagagacttccccatgtttgccaggatggtctcgaacttctcacctcgagtgatccacccacctcagcctcccaaagtactgggattacaggtgtgagccaccacacctggccaaaataagccttttttactgtatttatttgaagattaaagatggtttaaggtgacaaggggtagagtatgattgccaactatatgtgtaaacttgtttaggctgtactacccagaaattgtattaaacactgaccagggtattgttatgaaggtatttcatagaaacggttaacatctataatcagttattttgataatgtaggtggttcttatctaatcagttgaaaggccttaagagaaaaacagggttccctggggaagaaattctgcctcaagactgcaccttcagctcctatccacgtttcaattctgctggcctgaactctagcctacagatttgggactggcctgtccctgcaatcacatagcccatttcttcttctatctttttttaaaatttttattgtaggcaaggtgggtggctcacacctgtaatcccagcactttgggaggccaaggtgggcggattatgaggtcaggagttcaagaccagcctggccaacacagtgaaaccccatctctactaaaagatataaaaaattagccaggcacagtggcgggcacctgtaatcctacctactcaggaggctgaggcaggagaattgcttgaacccaggagatggaggttgcagtgagccaagattgcaacactacacaccagcccgggtgacagtgccgagactctgtctcaaaaaaaaaaattattgtggaggaatggtctcactatgctgcacaggctagtctcttaactcccggcctcaagagccgggtctgtcctgtagaccctggctgagcgatggatgaaaggagtactcagacacaggtatgtagtgtaagagcagctaggggactgctgaagagtgagcagtcttgataagctgggactgcttgcttttattcagtacagacataatgccaaaagcctggagccaacacagtctgtgggtaattaacattattgttcccccttttgggggcagcctcactcgtgaatgatcaaatgttggttcctagttaacataagtaaacaagcctgtttatgttaaattcccctacacttccttgtacctactccttgccctctgccttagggtaagagaacagctgctttcagcttattctcccgtgaagctatgcagagacttctgacctttcagaaggtttgcgtccttttcttatagcttctcccaccactctgaccgatctcctacactcaagcaatcctccttcctcagcctcccaaagtgctgggattacaggcatgagccaccgcacaccacccccatttcttgcagtaaaatatgtgtgtgtgtgtgcgcgtgtgcgcgcgtgtgtattccatttctccctaataccatttctcagctgcatgaatccttaactcatgaaagatactttttatcctcttgactctacagttaatggaaaataaaaatcatcaatagtgacttctaagattgcttaatatacctttctgggaggacagttagaactcctaatgtgagcttgtcagtttcttgtgaaaaccaacccagttgtcccatagaactgatgtttgtggtttcttttgactgaacctagaaattgaccctcccactcttaaaacttgagaaaagtacatttgtcataatcgtttgtcacagaaataaccaaatttccttgtccattgttttttaactatggttgtcctaagacttttgtcatccacaattattgtttgactttgagtcttctccaaaggtggcttacagtcagctacagttcagggcttctttgagagagttcataaaaagaacacttgaattcaagtttctggtaactttggagattgtcctatcagcctagagagaaaacttccaggactctaattagaaggctgatatattcataaaatacataattatgtatacatatgtttatgcaatatgaagcagagcaggagtttcatggactgtactaatttatttcatgataaataaaaatattttattatatagtatattaagccatcttagaagtcactgttgatgatttttttttctccattaactgtggagccaagagggtaaaaagtatctttcatgagttaaggattcatgcagttgagaaatggaattagggagaaatggaacacacacacacaaacacagagatttatttcaagtactgaatttattttattattttttgtgtgtgtttgaaacattgctgattctttttgttttgtttttgagtcaggagaactttttttgtaaatctactttctgtctctatgaaacttttttctttccagctatttatagcctttaacaattgaatatacatttgtaaacaaaatttgagggctatttctctctctgcctgatttctccagaattcagaaactatttgtgaatattcttaattcacggcaatgtggttgtttgcatatgttcaataagaatctgttttctagctaggtgtagcatatgttcaataagaatctgttttctagctacttgggaggctgaggcaggaggatcgcttgagcccaggagtttgaggctgtagtgagctatgatcgtgccactacactccagtctgggtaaacaagcaagaccctatctctattttttaaaatccatattattttataacacaattgtaggcactgggtcttttcccaaggctttgacaggaatggcatatttttaactatgcgagactgctttgaggaattaagactgactttatgggccaggcgtggtggatcatgactgtaatcccagcactttgggaggccaaggcgggtggatcacgaggtcaggagatcgagaccatcctggctaacatggtgaaaccccatctctactaaaaatataaaaaattagccgggtgtggtggcaggcgcctgtagtcccagctactcaggaggctgaggcaggagaatggcgcgaacccagaaggcagagcttgcagtgagctgacatcacgccactgcactccagcctgggcggcagagcaagactgtgtctcaaaaaaaaaaaaaaaaaaaaaaaaaaagactgactttatggagctgatgggagcccttggaaggactggcctcatatcttgtgcacacagttcctttgtggggttcctggcctgtagtaaatacagtgtcattttctgataggcctaggaacctcaagatgttctggggcctcaagaaaaacgggtttcacccaattcatgcaggtatgtacaggtgcagacagatctttggctgggcttaagaggtctttgggtgttgagtctgagagattccttatgaggggttccagcaaagccaatttaggaggaattgtataaacagtgattcttgctgtagtttggataagtatggtgggactgaagcttgttttgcaggtaagttgttcctgctgtgatttgcttttgatggaagtcagggactagagagagaaaaactgtttccaaagaaaactatagtgctgccaggtgcagtggctcaactttgggaggctgaggtgggcggatcatgaggtcaggagtttgagaccagcctggccaacatggtgaaaccccgtctctactaaaaatacaaaaattagccaggcatggtggtgggcacctgtaatcccagctactcgggaagctgaggcaggaggatcgcttgaacctaggaggcagaggttgcagtgagcggagatcgtgccactgcactccagcctaggtgaaagaacaaaactctgtctcaaaaaaaaaaaagaaagaaagaaagaaaactatagcgttagattaacctttgagttaatctgagtggccacgtggtcatctatggtatgcagccacccacaatacccctcctcagcataaagcagccagaaagatcacgtccagattccccatgattgaggaattgataaatagaaacagggaactgaaaccagctccagtgtcccatagaactgatatttatggtttcttttgaatcaacacattatagacattgagcctccccttcctaaaactcgagacacttttatttgtcttatctgatttcctttctcaggaaaccaagcatcaggcctcccagatagtataaagaaactgaaacttactggattaccacatctggaaaaacgagatgctataccccttacccatgatgattgcctaactgaccatctgctgcctgttgacccattcctcttccttaccccttcctaattcctgttttctcaaacatagttacacttcttccctgatgtataaacccctagttttagtcagttgaggaaagagatttgagattgatctcccattttcctcagctgcagcaccgaataaagccttcatccctgacaatactcattgtcttgctgactggccttctgtgcagcaagcagcaggatctagatgcaaggacctggcctttctggtaatattgtcatcaaccatttaatgatgtagacttggtccccggctcatgctctgtgtattttcttctccatctacatgcattgccttgatggtctcactcaatatcatgacttgaaataacagtgtaaggtaactcctaaattcatatattcatgctcaaaccttcttccaacattcagtcgtaagtcgaattgcctgtgacagagatactttgtggttctgtagacatttcaaactaaccatcctgagcctccgaacctcctccacttgcagcctccccacctcagaagtgggcaaatccactttttgtgtggtctgggccaaatacatgactccctgcatcacgtagaggctgtgctggtccaaagaaggctcaaaagagggcagtttgcgcacacaacgtgtcggggcagggcttccagatgatcattcggcttttttgtgtcttccaagatgatgatccggggaggagggatgtgaaagggggtcagtcgccaggcgagctgaggacccagttctgcgcctttgcctgtgccctgacctgaaggaaagtccctgtctcccgagctccgattttcccgagagaagaatgcaatgtaacccttgcccctcggttccctccctccatccttcccctcgagttgtgcccaccgtaaagaggtgggtctggagcgtctcctcgggtcctggagtgcctttccctgggaggaaaacttgcgccgtgaagcgttcctcccgttgttgaacacatgaggaaaactacactacttagaaggctgtgcattatgcgtacggcgggagctgggccaacgacggcctaggacggggacgtttccgacggctcacgccggtgggggcgggacttccgggttgctcgctgcggacgccattttcttctgcacttctgtctggagaggtctgtagccactgagggccccggtcggggccgctttgcaggtccctagtcaggaccgagcaggggagtaggataggaatccccgccgcacctttgtacgagcctgaccccttccgtgggtttgttcctgggtcgccgtcaagctgcggtctctcctcccccgcccttcagccccgcggtctccaggggcggcgccctgggtctggaacgcggttgccaccgaggaggcggcggccctgcgtctggaacgccgttgccaccgaggaggcggcggccccgagcgcgcctggaagccccgggcaaccggccagggtcgggcacaggtggggtccgtcaggccgcccggggctcctctgtcccagctctgcggcccagggggtgacgtgatggcggcagcggtgctgacggaccgggcccaggtgagtggacggtggcttcgcggttgccgcttccttgccagcgctgaggcggtttccgaagtgggtgggagcccaggtatcccctggatttgtcttcgcagtcgtcgttcgctttggtgtgtggagctggtttgccacttaatttatacctggccgtaaggagtgttgggcctactggaaggagctccgtaggttgttgagtgaatgatgcttcctctggggactcccatcatccttggcctgcaagcattctctggtggaccaggtctcattccagcatgaattgggggcctgaggggggaaggggagggcagggcagtagcaagccgacaaatgcgcgagcagagacaaggtatgttgtatgtttaaggaggctcaggagggtgtgtaaggttgccatggttttcctgcggccgctgagacgtggagggcaacagtgtgtggtcttttcctggatgttctagccatccgcaactactgcagacattgtggccagtcagatgcccttactctcatcgctacagcctgcattatccttggccgctcgtgttccgtggccccaaagtatcctggcgtcagagacaagttctgtcggaacccagtaaggaaagaggccgatggttggttcattgtggaatttccttgggggatctgggagacccagggagatcccagagggcatgggaagctggtctggagcctgtcgttccccaagtagatgcagcccttccagtgccgctctgtggggtcagtgaggaatgctgagctttttgtgcccgtgttcacatacttttttttgttttgagacagggtctcactctgtcgcccaggctggagtacagtggtgcactctcagctcactgcagtctctgcctcccaggttcaagcaattctcctgccccagcctgccgagtagttgggattacaggcatgcactaccacacctgactgatttttgtattttagtagagactgggtttcaccatatttgccaggctggtcttcaactcctggcctcaagcgatccgcccacctcgacctcccaaagtgctgggattacatgcatgagccaccatgcccggcccacagatacgtttttcagggctaattgaaatagacttaatgttagaaatgagtggaaatgcttataacttcatcgcattagatttgctttgatgttgggggagtgttggagttacactgttagaccgtgaatcatagtaaccccatgtttagatcctatctatggtggtgagatgtgtgactgggtgaattgatagcgcttccttagcatgaagtcattgactgtgaaggtgatgatggtgttgactgcagggactgtgaaaggattaataaaaatcccagagcacactgagcattgaatactttaaatttaacaactgttactggtgggaagtgttattgtattgatccagaaatcaaggctcagagaaatgaaatgctgtctttgaggtaagagctgtcaagtgtcagtttcaagtgtttggagctaggaacttctagtcactgtgtttacacaggatgtgaagccttcaacatggggcaggcacctagctggaccagtgagactcaggtactgccgttgtaaccattattgctattattaccatttccccatttccctgtcgttttagagcccttagcttctgtatttcacagtccacaagttgtttccgttgtcctgtgtcattctctaacggccgttaaataggaggcttctctcctttactctggtattatgttaaaagcatctatcttccctcttgagcccagcacagagctaggccctcaggaggtgctctgtgattcaggccgccatcactgtacaccttttccagtggagcacagtctgtgatctcattcagcagctgaaaggccaatactactaattctgtttgactttccaggtgtctgtgacctttgatgatgtggctgtgactttcaccaaggaggagtgggggcagctggacctagctcagcggaccctgtaccaggaggtgatgctggaaaactgtgggctcctggtgtctctgggtaaggccttccttccccctccaccatgcaggtgacctgccacttccttcattccatcttctgactccaggcctggctgcacaagaaggcctctagaatctaccttgcctctttcccacagctttagtcattttccacagtaacctcttcctatctggtctcctatatctctgggctaaagacagggtactctttggctcccagccaaaggagaaggtggtaaaaggaaatggggtgttttgcaaactcaaaggtaattttcagctgtgcctcatgaggggctggtgtaggaactgagaaccaccacgatggtgtcctggcttctctgtctgggtctgctcatgtcacgtctattctctatggctttttctgccttagtgagttcaagacaagagtggccacctggattagggttctctaaagggacagaactaatagaatagatatatataaaaaggacagtttattaagtagtaataactcatgattacaaggtcccacagtaggctgtctgcaagctgaggagcaaggaagccagtccaagtcccaaagctgaagaacttggtgtccaatgttcgagggcaggaagcatccagcatgggagaaagatgtaggctggtagtctaggccagtctagtcttttcatgtatttctgcctactttatatgctggcctcgctggcagctgattagatggtgcccacccagattaaggggggggtctgcctttcccagcccactgactcaaatgttgatctcttttggcagcacctttacagacacacccaggatcaatacgttgcatccttcaatccaatcaagttgacacattaataaaaatcccagagcacactgagcattgaatactttctctttaaatttaacgactgttactggtgggaagtattattgtattgatccagaaataaaggctcagagaaatgaaatgatgtttttgaggtaacagctgtcaagtgtccgtttcaagtgtttggagctagggacttctggtgactgtgttaacacaggatgggaagccttcaacatgggccaggcacctagctggacctagctgttaaccatcacaactccatcccttgtcaacttgaacccatacacatctcctgagatcatacataatcttcaaataaagacaataaggtcataattatgcttaacataatacaagtatcgttcatgcaaccgaaacacactaatccccaacccaagtgctattacataaaggtagcaatacttaaatgctgatatgaagtcagtaaatcttacgtcacatgataaaggaaataaaatgcagatgttttcttagtacaagtgtatacatcacaaacatgtttttaataaaagaaggaggaaatacaacaattacagtcctcatttctgcaactggtcacttggtcgtagttggtattaatgactaccttcttctcctgcacattctgtattcactttgccttcagcaagcacctcagcaggtcatggttttttttcctggtggagtgacccaaaccttcattcctgaagggtctgggccatttgtagtcctgcctggattgggctgttgtagcttcccattgaccttaatcacagggcatggtaatactaagagatgccctaatggatcttctgtattccatgcatactcttccttacctccattgtggagtagtagactgatttcatcttgatagtctgggtcattcatcccagccaacactgtaactcccttcttaggctattgacttaaaggtaggaggagcccaaagtgtccaggtggcaatcttaacttccagtttaatggaatcgttgtgtctcctggtggcagcattcctccctctgaaactaagacttctaggccaacggaatgtaatgtcgcgggaataggaagcaaaattttgctagttgatcactagggatgatgttgagtggtgccatttgcacttccaccccttgattcctggacccatgaatcctggctatgggagaaacagtaccatatattggatgctaattcagagcatacatggcctactggagaactttgccccagccctgcaaagtattgtcactagttggagtaattatgactacaaaaggtcattccaccattctgtcaatccagttgcttcaggactatggggaacatggtaagatcagtgaattctgtgagcatgagcccactgctacacttctttagccataaagtgagtgccttggtcagaggcaatgctgtgtggaataccattacgatggataaagcattccatgagtccgtgaatggtagtcttggcagaagcactgcgtgcaggataagcaaacccatatccagagtaagtgtctattctagtgaggacagacctctgccctttccatgatggaagaggtccaatataatcaacctgccgccaggtagctggctgatcaccccgagggatggttccatattgagggctcagtgttggtctctgctgctggcagattgggcactcagcagtggctgtagccaggtcagccttggtaagtggaagtccatgttgctgagcccatgcgcaacctccatccctgccactatgaccattttgttcatgggcccattgcacgatgacaggggtggctggggaaagaggctgagtggtgtccacagaacaggtcatcctatacacttgattattaaaacctttctctgctgaggtcttccattggtgagcactcacatgggatacagatatcttcacagtttttgaccactcaggtccatccacatccctcttccccagatttctttgtcaccaactttccagtcatccttcttcgaagtccctgaccatccagccaaaccattggctacagcccatgaatcagtatataattacacatcttctcatttctccttccatggaaagtgcacagcgaggtgcactgctccaagttctgcccactgggaaatttcccttcgccactctccttcagggatgtcctagaaaggggctgtagtgctgcagctatccactttcaggtggttcctgcatatcatacagaaccatctgtgaaccaggccctagtcttctcttcctccgtcaaccgatcatagggaacttcccatgaggccatcggtgcaggctgggggagagaaggtggggtggcaggagtggagtctgtgggcatttgagccacttcctcatgtaacttgtgccttcaggatccgcttgagcccaatcacatatataccactttcatctgatgatggaatgctgctgtgcgtgacccacttgatggctagctgggtcagaaagcacccagttcatggtaggcagttcaggttgcatggtgatttgatgacccatagtgtaacaggccaagagctgtctctcaaaaggagagtagttatctgcagaagatggcagggccttgctccaaaatcctagaggccttcgctgtgattcacctatgggggcctgccaaaggctccaaacagcatccctatctgccactgacacctcaagcaccattggatctgctgggtcttaggggccaagtggcagagcagcttgcacagcagcctagacctgcctgttgcagagccttctcctgttctggatcccactcaaaactggcagccatttgggtcactcgataaatgggctggagtggcatacccaaatgaggaatgtgttgcctccaaaaaccaaataggcccactaggcattgtgcctctttcttgattgtaggagggaccaaatgcagcaacttactcttcaccttagaaggcatatcttgacaggccacacaccactggacccctagaaattttactgaggtagaaggtccctaaattttagtcagatttatttcccatcctctggcacacagatgtcttaccagtaagtccagtgtgtttgctacttcttgctactggatccagtcggcataatgtcataaatgtaatggaccaatgtgatatcttgtggaagcaaaaagcgatcaaggtctctctgaataagattacgacacaaagtcggagagttgataggcccctagggtaggaccgtgaaggtatattgctggccttgccagctgaaggcaaattgcttctggtgggccttatggacaggaatggagaaaaaggcatttgccaagtcagcggctgcataccaggtaccaggagatgtgttaatttgctcaagcaatgaaaccacatctggtatagcagctgcaattggagcaaccacctggttaagctttctataattcacagtcattctctaagatccgtctgtcttctgctcaggccagatgggagagttgaatggggatgtggtgggaatcaccacccctgcatcattcaagtccttgatggtggcactaatctccacagtccctccagggatgtgatactgtttttgatttactatttttctaggtagaggtggctctaatggcttccatttggcctttcccaccttaatagccttcaccctaacagggagccagtgtgggggttctgccagctgctaagtatgtctgtgcctattacgcattctggcactgggaaaatgaccacaggttgagtctggggacccactggacccactgtaagtcaggcctgagctaaaactcctgacctccataagcccctactttaactggaggaccacaatgatgttttgggtcccctggaatcagcgtcagctcggagccagtgtcctgtagtccccgaaatgtctgatcatttccctttccccagtgcacagttaccctggtaaaaagccagaggtctccttagggaaggatgagagaaagattaacagcataaattgtcagtagtgtagtggggtccttcctcaagggacctggcctccccttcattcaaggggttctgggtctgtaaactagcccaagtctggaaattgaagggccatgattctgtttttgtaattcaaattagtcttttgtccattcgacctggaagttttctgcttatataaattaaataggattgcagtaggcttcctatcagtttcatttctgggaacactgtgattaattagccaacgccagagatctacatgagtcagactattctgattgctgctttgtctctgttgtccattatgatagctatgcctaccttgcctttgatggttgagtgccaccacttggcccctgccacctcgggatccaattattcccaatgtattaaatttttgtaggtgagtgactgaaattccaactgctggatctggcaattacagggctcttcaaagatgcaggtgctgccctcgcaaatctattttgcaagccattggttaaggttatgtcttatggaccctcccagctgggatgagtaggtctaaagtgactaatctactccatcatcccaatctccctaagcctttggatcccttcctctacattagaccaagggagatcaagcattcccagctcacccatgatgggccatcttttaatccatatttcagctagccaagcaaataagctattggaaccttttttaactcctcaggctgcaacattaaatgcaggatccctaattagtgagcccaaatcaataaattcagcctgatgcatctgtatgttccttccagcattatcccacacccttaatatccattcccgtgcctgttctccaaatttctgcttatataaattagaaaactcaattcaagtgtagctcacctccccatgggtcacactctgaacctcacttctgtgggcccatcgggactttagttataggtctagaagcaaacaaaggtgttgagggtgctagaggagaatcgatattatcttgcctggcaactgcctcaggggaggccatcactgttgcctcaggcagcacagggtttatctcctcagacaaaggtggaaaggctgatggcagcatgggtcggggagaggatgttgccactattggggatgccattttcctttctctttcttctgcctattaaacctccactcctaaaaaaaaaaaaagaaaaaatgatgaactcagggattctaactcctggcttcagaagcagatactaagcctcaaatctgctaagattgccctgagtgagtcttatctcctgtagagaaaaagctgaaattgtagaaaaacagacataagctagtcatgtgagtggctgacctgcaacaaaaggtgcatgcacagcctcaccaggtgtctactgttaaagtgagggcactgattggaaaagaatgggaccctgaaacttggaatagggatgtgtgggagaaccctgatgaagctggggacactgagcttgtaaactctgatgaaccttttttgccatcccccaaatgccatcccagcgctttgggaggccaagatgggaggatcacttgagcctagaagtttgagacaaagcctgggcaacatagtgagaccctgtctctaaaataaattgaaaaaaaaaaaagccactcagtaccctgttttactcccccaccccaccccgacctttgggtcttgtctttttctttgtctttgtctcttgtctcttgtgtcttgtgtcttgtcttgtcttgtcttgtcttgtcttgtcttgtcttttctcttttccttttctttcgttttcttttcttttctttttctgtcttgctgtcttgcccaggttggaatacagtggcacaatctcggctcactgcctttgcctcctaggttcaagcaattctcatgcctcagccacttaagtagctgggactacaggtgtgtgccaccacacccagttcgtttttgtatttttattaaagacgggattttgccatgttggccaggctcgcctcgaactcctgagctgaagtgatccatccgcctcagcctcccaaagtgctgggattacaggcgtgagccaccacacccaccctttactttttataataaaattttttttatacatttgttatatatgtgctatatataattaccatatatgatttgttataaacattagtatataaatgctggatttctaattggatcaaattatggacattgttttaatttacttattgtatgtgtatatatatacaacttatttatgtgaagatatttatatatatagtttttaagactaaataagggtggtattgtgtttgctaggcctggcatttgtatggtacataaggtttaaaagttcactttcttttttctgccccttgggtttgtagctgcctttttctttttttcgttatttctctctttgtgttttaggcttttggcatccagaagtagtggatcttagtttctgtccctgggtagtaaaaagaagctggggagaggaagaggtttgatgcctccaggcagctgcctctccctggtacagcctctgtcccaagtgtaatcagtcccccgctaaatgactagtctcttacaggatgggaagagagaataaataactcagttaagcagcccaccagtgactttggtgttggcttggttgattggacttgtatcccaacacaatccatcagaggaagtctctactcactaccttttgtgaggagcctcagccttgtatattaccccgtaaaccaacccagaaactaggtgtgtttatgttggaaaagtagactaaggagatcagtctgtcccagaacggtgccagctggggaattactgcccttgcgtatctagactgtggcatctttaaacactggaaggatctgaggagcactcctttaggattcctacagcactttaggccagaaacccatggcagcaaatgccagacgcagctgaagcacaaggctgccagcatctcgcagccttccccgggcagaactttctgtgtggtacaatcccttagtgagctgatcttcagccttcccatgagcgcagagtcagcctgctgggtgcaccagttgtattaatttgtatctatgggccaagtgtggtagctcatgcctgtagtcccagcagtatgggaggcaagagggttgcttgagcccaggagtttgagaccagcctgagcaataaagtgagacccagcctctacaaaaaaaatcaaaaaaattatctgggcgtggtggcacatgcctgtagtcccagctactcctaaggctgagatagggaagattgcctgagcctgggaggtagaggctgcagtgagccatgatcacaccactgcactccagcctgggcgacagagtgagaccctgtctcaaaaaaaagcaaatttgtacccatgggattttaatttatagcagtgacttagtgatgacacagagaggttaataacattgaaagaagaattcattatttacaattcgtgaaagaagagggcatatgctgggcctcatggggatacagctggaagcacaggggaggagaaagcctttaactgggtgtggtattctgatacatactggtttttgtccaccgttcctgattcataacccctatagcccttttgttaaaatgctgggtatgttaggcctcagggtcaggcctctgacctcctgccctcctttcgctctaacgttcctccacctttctgactgtgggtctcatgagtgggtccaaccctataccctgggaaaggaatgttgatgttttgaagcttccataaagactccaagaggtcacagttgagtgagcttccaggtggtccccccaggaagggcatggaagctctgtgccccttccgccacaccttgccctaggagtctcttcatctgtatcctttgcaatattctttataatacactggtaaacatgagtgtttccttgagttccgtgagctgctccagcaaattagttgaacccaaagagggggtcgcgggaaccccaactcaaagcccattagtcagacattttggaggcctggacttgtgactggagtgcagggtggggcagtcttgtggactcagccctcaacctgtgggatccgaagctatccctgcgtggatagtatgggaacagaattagaggacaccccccactggtgtctgctgcttggagtttggggaaaaccccccacacatttggtcatagaagtcttgttctgtattgtcatggtgtgagagtagagaaaaaacatgattagagagagttttccctgcgtattgggtttcttctggaaaagcaagacagggcatggtaaacagtttagagctggctagtttgagtaatttcagtgaggtttggggcatagggactatctctagttgtctggcacttggccctgggttgatttagggcaggggaaatactggcttggtatgtgagagtttgttaaagaagtggttgggggtatggtttggggttaggtggattgcacatgaaaggcatgtgcttgttcccaggggagtttattatcctagaaattacctgtccctgagaggagcagtctctcccaaagtctgaaaaggcttcaagatgttctgagcaacgtcaagaaaatatgactactgtattttcatctgacatgaacctaaacttactcggtttagaagataaaccttcatctatgaagctgtcctttgagggttttttgttgttcttgttgttgttttttgttttttaaagtagaagtcctctttttatgaaatgttggtgagagtagatactatttgatgtttctgtaaatgtccttatttaactctatcacagtagaacgttcagttttttaaatttttaatggttcatgaaatgcagaggtctggaatcactgaacctgcccctccccctggctgctggtccctgaggatgacctccagctcacatctctgcatcgtcatcactacccaccacccactctgtggtgctagtaatttcctccttagtgtggtgtttggaaggggagcccgaaccctggtgtccagccccagctctgctctttaaaaactgtgtggccatggccaggcgcggttgcttacgcctgtaatcccagcactttgggaggccgaggtgagcagatcatgaggtcaggagatcgagaccatcctggctaacacagtgaaaccctgtctctactgaaaatccaaaaaaattagccaggtgtggtggcaggcgcctgtagtcccagctcctcgggaggctgaggcaggagaatggtgtgaacccgggctgaggcaggagaatggcgtgaacccgggaggcggagcttgcagtgagccgagttcacacgccactgcactccagcctgggcgacagagcgagactccgtctcaaaaaaaaaaaaaaaaaactgtgtggccttggtcaaatgactgaccttgtctgttcctcagtgttctcattggtgagatgaggatttaccacatctgcatcccagggttgttactggggtaaagggttattgatagggtttggctctgtgtccccacccatatctcaccttgaattgtaataatccccatgtgtcgtgggaggtaattgaatcatggggacgggtttttcccatggtgttgtcgtgatagcacataagtctcatgagatccgatggttttataaaggggggttcccctacgcatgccctcttgcctgctgccatgtaagatgtgcctttctccgccttgtgtcatgattgtgaggcctccctagccatgtgaaactgagtcccttaaacctctttctctttataaattacccagtctcggatatgtctttattagcagcgtgagaacagactaataaagttattacgtgaaaagggctcaaaacagcacctgggagaccacgctgtgtgcagggagccattgcaatcctgttgccatcagtactgttattgtcatcctcatcaagatcactgtcgttggcatacctggacccgggactttctgggtagcgttgtggagctttgtggttaaacagcaccgacagcagagatggcaggacctgggccttactgactcagccattcaccagttctgtgctcttcagcaaatcactttacttcctgatcctgggtttctttgtcaataaaatggtgttgatcacgatgtggacttcctggggatgctgtgagaaaatcctcagctggaatcctcattttttctttagtctagaggaagagcattataaaacattgcttaggatgtaaaaaaaataagacttagatcaatgaaatcacataccttgtttggaatgaaaagagtcaatatttaatatttaaatacatcagtttttctctaagatactctatcagtattcacttttggaattacataatgcatttatgtaattatggaaaccttggtttccaggtcacatgccagcttttcattcccatgcacaggagcagcttcactccaaggtctggtctccatcctgaagtcccaaactagattgaaggtctttatttcttttcacccacatccatgtgtccacttgctttctccataaacagggtgtcctgttcccaaagctgagctgatctgccacctagagcatgggcaggagccatggaccaggaaggaagacctctcccaagacacctgtccaggtaggagccaagatctgggcaggttggagtcccttctggcttaagactggatggagaccactggccctggaatctcttgggaagcttctcattgtggcctctctctatataactcttatataactctatcacactagaatgttccatttgagagccatggagccctttgacctgtgttttctctgtcctcctagccccatcacagtgtcaccatgcctgggaagaagtgagatttaagaactaagatgtgttcaggggttccaactgtgtgggcctgaaatgtggcttgccagtcacctgctgtgtggccctgatgaagttgcaggatctcctgtctttgtatataacttcagctaagttaacagtagctgctgtatcagacagattctaaaatctcagtggttcacatatgaaaactctttcccactcataccagggactgtgtgggtcagcgaggagctctgtacgacacagttattcaggacccaggttccttctgtcatcagcctgttgcattaagattatcctaacgtcctcgagctggcagagaattgagggaataagggaagttaaacccacttccagaaataccaactcccctcacattccacccacaggaactaggcatttggcttgggtccatgggactgggaaatgtggctgagctgcttgtccaaggagaagagcagaaggtttggtgagcacctactctcagtccactacattgagtctgttcctgaaaagtgttattagaaatctttttttttttgagacggagtctcgctctgtcacccaggctggagtgcagtggcacagtctcggctcactgcaagctccgcctcccgggttcacgccattctcctgcctcagcctcccgagtagctgggactacaggcgcccgccaccacgcccagctaatttttttttttttgtatttttagtagagacggggtttcaccgtggtctcgatctcctgacctcgtgatccacccgcctcggcctcccaaagtgctgggattacaagcgtgagtcaccgcgcctggcctagaaatcatttttatgtcattgggcagtttaaagatgttatgtgatacattaatgcataaaactggatagtttctgagccatagtaagtgactcatccgaatgtcattattaaccttaaagagtgatgctatgttacatttccttctgaactctagggaatagggcctttcttactctcccaatttctctttccacttatattctgcctatcagcctctcccaccttctccttccacccattccctgagtgtcaatcagacactaagaagcagtagtttgcccatgtcttcctatatctcctgttttccaaaaacctcagggtgacatttgaccttctgtgtcccacactcaggctgctgagggcactgaggccatctgtcatgtgtgtggattggtgccactgcagagccttggcctctgcccgcgtgggttccttgagctgctcatccaaccctgagtgtctgtgcagtccctgttcagcccttcagagtctgttccagattgtcccctcctcagtgccacatctgcacttgaaaatctcaaaagcacaaaactcaacatgcctaacaaggaacccatgatcttgctcactcctgccacctcccaagtttctgtgaatggttctgccatccaggcagattaggggactggccccaacctcagacaagtcaacccctccacctccatgagtccctgcatccagccaagtagacagtttttgtctccaggcacagatgtctcagcatgtgagtgctgatgtgttagcaggctttcaggttgaaaagaaagtctcctgtcttgtattgcttgatcagcagcccttacatgttcatctcaacttctcttttccttactggaagaggtcttgccccagtcatggccaattcctataccagggtctagaacacacttcctttcatggacatcctttcttcatttatattctgcttgttttgtgattctctactcaacctaaaaatatgcttgtttcttcttttttcttttctttttttttttttttttttttagagtctctctgtgtagcccaggctggagtgcagtggtgctatcttggctcactgcagtctctgtgcctcagcctcccaagtagctgggattacaggtgcatgccattacacccggctaatttttgtgggtttttttgtttgctcgcttgtttgttttttgttttgttttgttttttgagatggagttttgctgttgttgcccaggcgggagtacaatggcgcaatctcggcttactgcaacctccgcctcccaggttcaagcgattctcctgcctcagcctcccgaatagctgggattataggtgcatgccaccacgcccggctttttttgtatttttaataaaaatggggtttcaccatgttggccaggctggtctcgaactcctgacctcaggtgatccacccgccttggccttccaaagtgctgggattacaggtgtgagccactgcgcctggccatatttttagtagagacagggtttcactgttgttgcccaggctggtctgaaacccctggcctcaagcagtccatctgcttcggcctcccaaagtgcagggattacaggcgtaagccactatgcccagcctcgagtttcttacaattgaagaaaataaaacaaatgcttgtggctcatgatatatttatatattcattgatacattcatttactatgtgggcatttaattgtctagatttggctggcacagtggctcacaccataatcccagcactttgggatgctgaggtgggaggattacttgagctcaggagtttgagaccggcctgggaaacatggtgagaccccgtctctgcaaaattaaaaaaattagctgggcatggtggctcatgcctgtggtcccagctattcaggaggctgaggtgggaggatctcttgagcccaggaggtcgaggctgaagtgatcttattcatgccactgcactccagcctgggtgacagtgagctcctgtgtcaaaaaaataaataaataaaaataattcatgagagaccatgaaccagaggcaaaaaaaaattaataataattttctatgtttcattcacagaaacagtgatactgtggatattcatatatgtatttcattttccacttgtggaggtgcattttttgatcattcttggagtgaaattattggtttgtaggctatgcaaatgctcaagtttgcaagatcattccctttgttttctaaagagcttatgccaatttgcacttaaccaggaaagagaggttccgttgacccatatcctttccattataaggcttatcaatgtttgctcatcaaatggacacagaatagtctcgtgttcttgatttccctttctttcactgctgtaatgttttagcaacttactatgatttttggttgatttatattttcttctgtgaaaatagaaatcattttttattttatgatgaatgcctatttccattaacctgttttcctttcactgcttggtaggggttcttagtacattcttatccttaccttttatcacttatatatgctgaaaaatattttctagtttttaattttgttctcttactctctttaaagtatctttctccaaaaggtcttaatttactgtagtctaacttatgacttttcttatataattaatgatttttttgtcttgtataaaaaatgttggtttacctcaatattaaaaatatattttattctaaaagttttaaaacttggcatttgacattttttcagtgaggttgatttggaatatatagtgtgatagcaatgcagttattttcgttctccatgtggctacccaatttttctagcttcgtttccttaatttaacagaccatcaagttccatagttaagtatagttggtattttacagggaattatattgaatttatataatttgggtcgaattgtcagttcgtattattaaattcttcattgatctagatcatctttattgtcttcaaataagattttataattttcttcatcttgatcatgtgtatttggggttttttgtttgttttaagagaaaaggtcttgctctgttgcccaagctgggtgcagtggcacagtcatactttgctgcagtcttgaattttgcggctgaagcaatcctcccatgtcagcctcccgagtagttgggactacacaggcttgcaccaccatgcctggctaatgtgtttttagttttgtttttaaaaaattttttttagagatgggagcttgccgtgtttctcagagtggtctaaaacttctgggctcgagtaatctgctcacctcggcctcccaaagcactaggattacaggctttggggggctgaggtgaaaagatgagcaccatacacagcagcctggccattggtcatgtgtatggtgctaatcttttcaccaggctgttcctcaggcatacaagactcattgtgtcaagccaggtcctcttacctctttccttatgagccttcaattgatataacatcagtcatatcaccttcactgtcacccagctcggaatcatgggaatcagcctcccctctgtccctggattgtcatcaacaccatcctgcagtttctttgtactttctgtctctttagactacagtgtccagtgtccttcctgctttctctttatggcaactcttcttcacaagcataggactcacttcattgagcacctcttactggaaaactgatttcttcctacccaggattagccaagctcaaggttaaggacacagtcctctaagactaccaggtctaactcttccgacacggactacaggtttgggtcccaaagccgttgtcaggttcactaattagctttagactcacaaaattctctaaaacctgttttagttacagtcatgtttattacagacaaagggaacaaattagaagtgacacagaatgttgggttggaaaggttcccaacacaaagcctcagtgttttcaggaactcgctgtgccccagtctggcatatggcaatatgagcttagaatgttgccaacccaggaaactcaccagctcttcattgtccagaattgtactgaagcttcattacataaccacagttgattgtctcatcacctgtgtggctcggtctccagcgtgccatcctttccagagattcagcatttaaattatgacataagccctaaccttctaatcacgtggtttagctttctggagtggccagaccttaacctgagtcatctcttcaggataaactgtggaggactccatagtgagttccccgtttgcataaactgtcagatagggccattgggtcccaccataagtaaaaacattttggaactactcagtgtttacaggttactttccatgacttcacaggaaaagcgtacttctctttggggattaatttttgttactcacttcctgtcttccatgtgggctcattaggtgctccttcctcgtgttcttgtagcaacacagcatgtccttgcttagttgcttacaggaagcttaccatgcacggtgtcgtcgttactctgtctacccaggtccaatctgtaattgtgaaggtggctccacgaacagacgcattgtctcctgacccagcctctgcccctaggtctcccatgcagaatatcccgagtccaaggaccaggatagaaagaaattgcaaacccaagaatttgagatacagaaaatagcaacacagaggcaatatttttatctatggtttttcacagaaatggtaatattcttttttccatgttgtcctttactaacaggcccttttgtgtgctggatttctttcaggcgacaaaggaaaacctaagaccacagaacctaccacttgtgagccagccttgtcagagggaatctcacttcagggacaagtgacacaaggaaactcagtggactcacagttggggcaagccgaggatcaggatgggctatcagaaatgcaggaaggacacttcagaccaggaatagatccccaggagaagtctcctgggaagatgagccctgaatgtgatggtttagggacagctgatggtgtgtgttcaaggattggacaggagcaagtctctccaggagatagagtccgtagccataactcatgtgagtcaggtaaagatcccatgattcaggaagaggaaaataactttaaatgcagtgaatgtggaaaagtatttaacaagaaacacctccttgctggacatgagaaaattcactctggagttaagccctatgaatgcacagaatgtgggaaaacctttattaagagcacacatctcctgcaacatcacatgatccacactggggagaggccctatgagtgcatggagtgtggaaaggccttcaaccgcaagtcataccttacccagcaccagcggattcacagtggagagaagccttacaagtgcaatgaatgcggaaaggccttcacccaccgctccaattttgtcttgcataacaggagacacactggagaaaaatcctttgtgtgcacagaatgtggccaagtctttcgacataggccaggctttctccggcactatgttgtccacagtggtgagaatccctatgagtgcttggagtgtggcaaggtcttcaaacacaggtcatatctcatgtggcaccagcagactcataccggggagaagccctatgagtgcagtgaatgtgggaaggtcttcttggagagtgcagccctgattcaccactatgtcatccacactggagagaagccctttgagtgcctcgagtgtgggaaggctttcaaccaccgatcctacctcaagaggcaccagcggattcacactggggagaagcccttcgtgtgcagtgaatgtggaaaggccttcacccactgctctacttttatcttgcataaaagggcccacactggagaaaagcctttcgagtgcaaagagtgtgggaaagcctttagcaatcggaaggacctcattcgccacttcagcatccacactggagagaagccctatgagtgcgtggagtgtggaaaggccttcacccgcatgtcgggcctcacgaggcacaagcggattcatagtggagagaagccctatgaatgtgttgagtgtgggaaatcgttttgctggagcacaaacctcattcgacatgccattatccacactggagagaagccctataaatgtagtgaatgtggaaaggccttcagtcgcagctcgtccctcactcagcatcaaaggatgcatactgggaaaaatcccatcagtgtaacagatgtgggaagaccttttacaagtggacaaacctcagttacccttcgagaacttcttttagggaaggactttttgaatgtaaccactgaggcaaatattttgccagaggaaacatcttcctctgcatctgatcaaccataccaaagagaaaccccacaagtgtcttcactgtgagaaaaccttctgttgctgaatattacttgtcatctgaagagtcatattagaaattcgttcagtctagagccttattctccatctgataatttatcctggagagagacccagtggttattgtgcacataggagaaccttcagctgcatctttctccttagtttacagtgcaattttatctcaggaattatttttaaaaggaggaggggacatagaaaaaatgaaatgcaagcacacatcttttcaggcttctctgccaagcctatggcgctttgtcatggatttcttagtgtatttgggggaagggaaatgtttcaaggtaaagaaccttgaccctttatgtgcttgtatgtacatttattgctatccagtgtcagaacagttagtttaggaaaagtatgcaaactttaatcgcacatcttctgtattccacaatagtacttactcttgagaagcataactttatgacaacttagggggcttgagccatgaaatactcacgtttaagtcagtaaggatacacatgttaacattcaggcttttgtcttgatgcccgtcttttggtttacgtcatcattgtagccatatggtaaatttttatttgttaaatttttaaaaattacttagctcaaaatgtcagtggtaaatttttaaattgagtaaagtgattcttctttgctcttatttaaaatcgacagcatttctagttcctttgacattccatataatttttaggattagtttgtacttatttacaaaacagtcttgttcagatttttacagaaattgagttaagtctgtggattaatctgttaagaattggtatctttactatgttgggtcttgtagttcatgagtgcaggagtaggcctcttaatttataatagttaagcattccttaaagtatttcattaatgttaaaaattttcagcgtatagatccctatgcatttttgttagaatttgcatcctagggtgcttttttgtttgtgtgtgtgtgtaatttgagtgattgtaaatggcattgatgtttgaactttgaattgcacacaatttttggtagtatacagaaatataatatttttggacattgttttgctaccctgcaaccttattgagttcacttattatttttagctatttctttcgacagaatccttggaattttctatatagaaatgtcatctgcaaatacagaccattttttatctttcatcttacctgtaatataccttttatttcctttttgtttgtcttattgcattgcacaagctgggacttccattatagcgttgaataggaatagtgagaaaggccatccttacctggttcctgatagtaggggggacaatgttcagttttttgtttttttgttttttgtttgagacagggtctcgctctgtcacccaggctggagtgcagtggcacgatcttgtctcaccatagccttaagttcctgggctcaagtgatccccccacctcagccctcaccaccccccagtagctggtactacaagcatgcaccaccagtcccagctaatttttgtattttttggtagagacagggtttcaccatggtgcccaggctggtcttgaactcctgggctcaagcaacctgcttgcctgggtctcccaaagtgctgggattacaggcgtgagccacagtgcacagcatgttcagtttttcatcatgaagtataatgtaagttttataaaacatatgtcctctataagggtaaaaaatttcctctgttcccagttttctgagactctgtgttgctatgaataagtgtggaattttgttcagtactttttctccaccagttgatgtcattatgctattttccttctacatcctattgatggaatgtattgctttgatcaagttttgaatattgagccagccttgcatccttagaataaaccatacttgtttgtagagtataattgtttttatatatcatttgacatcattccctttgtttgtattttgttgaggaaatattcctctaatttattggctaataatgtgtagttcttttttcttttgtttcttatgttctaaatgtcttatgtgtggttttgatgtctaggtgatcttgacctttcaacatgaattggaaggagttctcttctaatttttggaagactgtgtagaattggtgttatttgttcttgtcatgtttgatgacctctagtcaaccattgggccagagatttttcttctggaggcttttaaattacatatttattttattggataggtagaactattcgaagtatctatttcttgtgtaataaattttgatagtctgtcctgttgaaggaatatttcatctgtatttgtagcactcccttattcttttgatagcaggatctgcacttctttttatttttaatatttaaaatgtgcatactcattttatgattgagtcttcttagacatttatcagttttattgcgcatcatgctgaaagatgtaatttttgcttcatctctcacttcagagaactagcactttatattaatgatttgtctctattcttgatttctttgatttctgctctgatcggtattatattccacttgctttggttgtatttggctctttctaacttttcaaggtggggttttagattattgatttgagatttttttgcttttttaatgtaagcattacattgtataaatttacctcatatcactattggtttgatcccacaagttttaatgttttcattacattttaattctaatagtttttattttttgagacattctctcttagccatgaattatttaatagtatgcttaattttctggtgtttggcatatttgttactgatttctaatttgttccatgtttgatctgactgtttaaatgtgttaacatttttttatgacccaggatagggtctatcttgtttcgtatagctgcttgaaaagaatgggtgttctgctgttactgggtggagtttctataaatgtctctatgatcctgctcattgttattcaagtcagctatgtccttgctgattttctgtccagcatttctgtcagttgctgagaggggtgttgaagtcctgaacataggccgggtgcagtggctcacgcctgtaatcctagcactttgagaccactaaggcaggtggatcacctgaggccaggagttcgagaccagcctggccaacatggcaaaaccctgtctactaaaaatacaaaaattagccaggcatggtggcgtgtgcctgtaatcccagctgctggggggctgaggcaggaggatcagttgaacgtgggaggcagaggttgcagtgagctgagatctcaccactgcactccagcctgggcaacagagcgagactctgtctcaacaacaacaacaaaaagtcctgaacatgattgtggaagtgtgttgctctttcaagttctatcactttttgtttgcaaagttcaaagctgtattgtttggtacatatacatgtaggtttgccaagtctttgtggtgaattgactcttctgtcattatgtgatgtcatttttttgccttttaatagtcttgtcaatactttacctgatgttctcatagtgactcctgcatattttgattaatgtttgcatggttaatatttcttcattttattttaaagcttacctgtatcattacttatgaagtcagtttctttgaacagcatatactcaggccatgctttttttattcattctgcatatgtctctcttaattggtatgttgaaatgatttacattaaaataattattgatattttagggcttaagtgtgcccttaaatgatttttgtgttcttttttattgttcctctgttatttggggttgtttactagtcttcctataggttacttcaccttttttttttttaataatttgatttgatacatatgtagtgttttttagtatagatcctccttgacttatgatggggttatgtcacaataaacccattgcaagttgaaaatactatgtcaaatatgcatttaatacacctaccctgctgaacatcatagccgatcttgccttcagaatgctcagaaaatttacattagcctgcagttgggcaaaatcatctaacacaaggcctactttataataaagttactgcaaagaattttaaataaaaattcaagtgtggtttctactgaatgcatgtcgcattcgcaccattgtaaagtcaagtagtaagtcgaaccatcctaagtcagggactgtctgtatatatctgcattttttagtgattgttctactattacagtgtaaatatataacttatgacagtttaataagttatcagcaatttagcactttacttccattaggttcctttagcttacctactaatgtaactatcttaagtaatagtaattcctcttcaaaaattgagcgctatgttgcaagatgtaatttttcttttccttttttttgagaccaagtctcactctgtcacccacgctggagtgctgtgatgcgatctcggctctctgcaacctctgcctcccgggttcaagcaattaactgcctcagcttccctagtaatggattacaggcgcccgccaccacgcctggctaatttttgtatttttagtagagacggggtttcaccatcttggccaggttggtcttgaactcttgacctcatgatccacccgcctcggccccccaaagtgctggggttacaggtgtgagccactgcacccggccacaagatgtaatttttactttatctctcacacgtattttacaaaacgtcatgagaaacattgtctcttgaccttttttttttttttttttttttaaagagacagagtctcactctgtcacccaggctggagtgcagtggcacgatcttggctcactgcaacctccgcctcctgggttcaagcgattctcctgcctcagcctcctgagtagctgggattacaggtgtgcgccgccacacccagctaattttgtatttttagtagagacggggtttcaccatgttgctcaggctggtctcaaactcctgaccttgtgatccgccaaccttggcctgtcgacctctttacccattccattgttcattcttctttcttgaaatcccaaaccttctattaacatttcttttcagttatacactgaactttactgtagcctttcttctagagtaacaaatgttctttgttttccttcctctaaagatgtctttatgtttccttcattcccaaagaatatttttgtggaatataagattcagagttggcagttgttttcttttagacttcagagatgtatctctctgttctgtacattattgtttaatataagaaacctactagcattcaaataatcattccctattttacaatgcatcagttctgtcaagcttcattcaaagtgtttttcattgtctctagtgttcagaagtttggctgtgatgtgcgtggcatggaagtttttgggtgtattctatttggcgctccctggtgcttgcccagctttttgatctgtaggattatgccttttgcaaaatttggggaactttcaactattatttcttcaaatattttttcaccccccagtcttgtcttttttagggacttcaataacatgagtggcagatcttgttttacactcccatgggtccttcaggctctcatcttttttctttttccagtctattttctgtcttgttaatattgattaatttttattgaccttccatggtcctcactgattgttttctttgtcatacctaatctgttgagtttgtgcagtgagttttcattttggttttgtattttccagttgtttaatttccattgggtgggttcttttgtacaccttctgtttctttgcttattttttaacgccaaagaaagactctcagagaatagacaactatattccaaagtcatggttctctggtggtttgtcttgacatttgaatagaaatgttaaactatctgggggaatagaaagcccacagtcttctgagttgtgctacaccaatatttctatgaacagatcttacaactgagagtgatctgcagatttttcagagtcatgttctccatggaatgtttgtaaaattccctagctctctgcactgagctgagatcgtgccactgcactccagcctgggcaacagagcgagactccatctcaaaaaaaaaaaaaattctctagctctctatgccttgttgtatcctcaggaaggagtcacctctcttccaggatcactcttgccttttgttattggacacattttcctacctcctgcccagtcttttttaggctctctgtcatacttcctcgcctagtctttaacttgtctctgataaccagatttttcccccataatctgtatctgtattcaagtctctatcctcatccccaaatggatttcaccccgcttgtccatcagtctctgcccatttcttctgtctcccacagacatggtctgtgtagttgttctgcacactacccgtcctcgccccttctcatttccctcactccacggacagctacaggagggcttccatcatttgtcctcttacttccttgttagaactttgtgctgctgaccaccactctgaaccaaaacttctttcttggttcttgaaagttgctgtctttctcctccagagggtctgtgtcttccttccaactcttaaacatttttgtttcccagaatccatcattggccattgctttttcacttgccatgagctctgtgaatgagatggttcctgctgaagacatttactttcaatgatctacagaatttcccaaatctatgtctccagactggatgtttctcacgtctgtggcccactgggcatcttctgcactttctctgcatttgtaaacactgagcctgtatgcgtgtctatgtggccatggccctggccgtggggatgcacccataattataatgagagcaggtgaatgtcatgtggctatgtatgagacattgttgtgaatgttttacatgcatcagctctttcaacatttacagcatctgtgtgtggtaggtaatgttgtttccttcattttgcagagcagaatatagataggctcaggttaagaatttgcccaaggttacacagttatgaagtttggatttaggaatgggaggccacgtagactggcttcagaattcatgtctttaaccactttattgcttctcatgttggggggtttgttttctggtcactatttttactaaagttgattcaacaatgctataatctgttactctcattcgacaatacatcttgactgtttcttcaacttgaggaaggtaaaccaaagccactctttaatgggtgcaaatatctgttgtaactatgtagaagatacagtgtctgggtttgaggacaggggagtgggaaaactgagtagggaagcggtaagacatgcatctggctttaggagtgtttgaagtgcctaaagatcagggtgaatttcccaaatttgaatcttgttgcccaagccacattgcaaccacctctttttctcttacctcgtccccacatccaggcactgccccattctgttcattccacctttttttttagtagaccctccatatatgtgtgtgttttggtgaatggccacacacagcaaagttatttttattgcaattttgttgttgttgtttgagacacagagtctcatactctgccacccagactgaagtgcagtggtgcgatctcagttcactgcaacctccatccccccatgttcaagcaattctcctgcctcagcctcccaagtagctgggattacaggcatgggccaccatgcccggctaatttttgtattttttgtagacacggggtttcaccatgttggccaggctggtctcacactcctgacctcaggtgatccacccgcctcggcctcccgaagtgctggcattacaggcatgagccaccacacccagcctttattgcaatttttggttccctcacagaatgtttaccatgaagctgtgcgtataggtggtaccatgtatgacataccttgacctcaaagataatctacctgggctttttttgtttgtttgttttgagatggagtctcactctgtcacccatgctggtgtgcagtggcgtgatcttggctcacagcagcctctgcctcccgggttcaagcgattctcctgcctcagcctcctgagtagctgggactacaggtgcctgcgaccacacccagctaatttttgtatttttagtagtagtgggatttcaccatgttggccaggatggcctccacctcctgacttcatgatccacccgcctcggcctcccaaagtgctgggattacaggcgtgagccaccgcacctggcctacctgggcttttttggacagatgtacatgattttagaaattgttatgaatgactgtcttgggatcctcaagaacacccccaggtttgacgatttgctgagaagactcaggtctcagcattctgtcatactcaacagctatgatttactgcagcaaaaaaatacaaagcaaatagtaaagggaaaaagccaaaattcagagaaaaccaggcacaatcttctgagtcttgtttcagtgaagtcacaggatgtgccttatttaagttccatctggtacttatgacaacacatgctatatgtccactgggaagcttattagagactcagtgccagggtttttattgggcatgttttctagcacatcccacaattctggacttccagaaggttagcaggggttcagcttttcagctgaaaacgttatccccctttcagctggggggaaaaaaaggcaccgaaaaacagggcagtgagctactcctgttttgggtgggtggagcagtagtaagcctcccaaaatctaaggtcccacactccagcaagggtgaaccttgcaaactcaaaaggatagcagtctccaacctgctgttttatacagtgacttaagtggtactaaaatgctatataagtcaaatttacgtaacattaagcaaataattttttttcagcaaaaaaataatggtcatgactttgtggtgaaggcttatgtaatgattgtaataaattcaggtggctcacgcctgtgataccagcacttttgggaggctgaggcgggtggatcacttgaggtcaggagtttgagaccagcctagccaacatggtgaaatcccatctctacaaaaatgaaaaattagccgggcgtagtggtacatgcatttagtcctagctacttgggaggctgaggcaggaaaatcgcttgaacctgggaggcagaggttgcagtgagccgagatcatgccactgcactccagcctgggtgacagagtgagactgtgtctcaaaaaaaaaaaaaaaaaaaaaatgcctcagttttgttaagaggaaaaagcaaatcctaagttacagtggaacttatgaacaccctagcctagagatttaatttagtgatgaaaaggtacagagagagtctttcaagaaaggacctagtctgctcgcgttctctctctctctctctctatatatatatatgtatatgtgtgtgtacatatggaccacttcaagctacacacacacacacacatatacacgtgtatgaatatatatatatggctataagtggtgcgacttgcaggtactccctttgttcacctttgtaaagatgttattgccagttcagtgtgtatttctatagtatatatgtaaacaatttgtcatccttttgttgctgcttttgaaactagttcatggcttcagtgggggagagatttaaataatatgggtttataatttctgcattattaaatgcagataacttgtgattaaagagtatgttattggaatcatgtttgcctgagttttactttggaggagttgaacagctgactccagccgagaggtcccctacagagacgggatgttggagacccacgggaatctggcttgtgggaattgcacagcaccctttttatcataccgcagcatggcctttcctgtctcgattgtgggaagctggagtgcctctgcaatgttcagtagtgtgcttgggttttgagggtcaaagatttttaatctttgccacaggcatgttacacatcttaaaattgtgtggtctcaactgaactgctccaaggagaagaaacactgccttgggcgcccagtgttggattacaggtgtgagccaccacacccaggctgtattgccactttcgagcgaagaaatgggcaaggcagaataaacaagttatgaattggctagtctgaataatttcagggagctccagagtatatagactgcttttagctagtaactagtactggggtactagttcccagctaaaagtaactgagtaagaagggggatagtagctccacatgtgagaacttgccaaagacagttgaggggtagggctgtggaatggctggtttgcatgtgacaggcaagatagcggaggagaaataccctcttgagtaagggttacgagccatgggccttgtgttgactggccaggtgactttaatgaaattttgtcacccaggctggagtgcagtggcacattcatagctcactgcagcctcaatctctcgggctcaggtgatcctcccgcctcaacttcctgagtagctgggattacaggtgcttgccaccatgcccagctgattctttttttttttttttaaatctagagatgagatatctgtgttcgaaacccagtctggtgtcgaactcctgagatcaagtggtcctcctgcctcagcctcccaaagtgctgggattacaggcatgagctactttgcctggctcagcatgtgtttttattctgatattttgacaaatgagaccttgctgatcctggagacactgctcctcttagaggtagcaaaagtctcctccgcttttgctaagttatgaattgctaagccaattcataacttgtttattctgccttacccatttcttcactcgaaaatggcaatacagcccgggtgtggtagctcacacctgtaatccaacactgggcgcccaaggcaggaggctcacttgaggccaggagtttgagaccagcttgagcaacatagccagaccccatctctacaaaaaaaaaaaaaaaaaaaaaattcacggggcacaatagtgcacacctctagttgcagctacttggaggctaagataggagtgttacttgagcctgggagtttgaggctgcagtaagctgtgactgagccactgcacctcagcctggacaacagagcaagaccctggctctttaaaaataaaatgaagaaatgataacacaggctttacccacactttccccttcctcctgtctcctaaccaaccgtgagtcttccctgtttagccctgtgtggcttcatataccccctcttcatgggaactatgagttacacactcatcagtggcagtcttctgatctgttggcatcgtcaacgctaaataataaaatctacattttaaaaaacctacctgaaagcactcatgaatttcaagaatttagcaaagcaaatcagccatttccatgtcatttccaaagaactgtgtcagtgcaccaagccaaatgtgatacttaggttggaactcagtggacagccatggaaggaggagggggtcaatgccaaagaggggctctccagatgcattggtaggacccaggcgtttgagggaccattgtgttagcaaaatctcaaccatctgaggggttggggtttttaggaaggtagctcctgatgcccttctcatagcccgacactcaagaaagctcaagcacaactaattgagggccccaaatacacaacaccttccgatatcattctccccgggccacttcttaatgtttgcaagtttgaaggaagaatgccatctcccggcccgaccacatggtgttttcttgattatcctccctttcatgggcatcctccctcctttcttaagcctttagccatttgtagctgtgtggtctttcaacatctctgtactcttgttcttcctagttccatgtcctggctctcaggtataagaactcacatatgttcaaagtgtgtctcttgatctttgaaattaggcttcagcagtgacagtaatcttttttcatctcagtttcttgacttttggcatacatgtcatttcagccacctacaagcctattttccatctgcatgttcttttgctgtgtgtgtgtgtgtgtgtgtgtgtgtgtttgacataggatcttaggctgggcgcggtggctcacacctgtaatcccagcactttgggaggtcgaggcaggtggatcacttgagattaggagtttgagaccagccttgccaacatggagaaaccccgtctctactaaaaatacaaaaaattagctgagtgtggtggtgcatgcctgtaatcccagctactcgggaggctgaggcaggagaaatgcttgaacccgggaggtagaggctgcggtgaaccaagattgcgccattgcactccagcctgggcaacaagagtgaaactccatctcaaaaaacaaaaaacaaaaaaaaaatagggtcttctgatcatggctcactgcaggctcagcctcccaagtatctgagactacaggtgcacatcactatgcccagctaatttttaaattttttgtagagatgggggtctccctgtgttgcccaggctggtttcaaactcctgggctcaagcagtcctcctcccctggcccccaaagtgctggggttacaggcatgagccaccgtgcctggtcttcatctgcatgttcttttgtcattttcaaaccctttctgaattatcctcacacttcttgagtatcagacatcaccagtctgatcttccatatgtccctatgtctgtatgggcttctccagctttgagttctttgtcttttcctcactctcttcctctaatggaggagcctcttggggctcatgtcacgctcccattacctcttccttgtgttatttctctccacgtcccgcaactcccctctccttgtaaactccccggctacagcaccacgctttttaccactctggtgaaggtcagcagtggctccctgtttatgaatcctaagtccttgtcttttctgggctatggacaggacttgaaactgttgttgtccagtcctttctccagatgtactcttggattctgtaaggttatgcttctggttttctcccctgcaccctctcactccttttcccctttcatgttggtgcatccacgtgtatccagccatttggtgttgaattttttttcttttttttttctctttgagacagagtcttgctctgtctccgggctgaagtgcaatggcatgatctcggctcactgcatcctccgcctcccaggttcaagtgattctcccgcctctgccccctgagtagctggcattacaggcatctgccattatgcccggctaatttttgtatttttgtagagacggggtttcaccatgttggccaggctggtctttaactcctgacctcaggtgatccgcctgccttggcctcctaaagggctgggcttacaggcatgagccaccgtgcctgaccggtgttgaaatttctaaggctttgtcccaggcctcttttttctcttactggtctctccccaggcctcatctgcactcttgggttcagctacctactttagtgaacataccctaaaacgtatttccccaaccctcatctcatacaagtcttactgctctcctttcactccatgcttccctttccttttcccactcgagatggagcttccaccacctgctttgcccagttagcaaatgtgtatccttcattttgtcccagagagcacaccttcacagaagcccactagagcacccagctagctcatacccattctttcatgattatctattgatttgtttggttattgaataatgaccgtatcctgaactcaatttccagcttcgaaaaagcacagaccttgatctagattttctcctaatgttccatgtgcatagtttgtagtcaatagtatgtattcagatatttgttaggtgaatgagccttaatcatttttgacattttaggttatgtgacattctctccccagtaccacctcaggctcgatgatttgcctgaaagtcaaaattcagaaaagaaagtcacacacaactcagaaaagctgttgtactcatggttacagtttattaccacaaaaggatagagaccaagatcaccaaaggtaaaaggcacataggaggaaatctgtgagaaaccaggcacaattttttttcttttttctttttctttttttttttttttttttttgagatggagtctcgctgtgtcacccaggctggagtgcaatggcacaatctcggctcactgcaacctctgcctcccaggttcaggtgatcctctgcctcagcctcccaagtagctgggattacaggcatgtgccaccacactggctgatttttgtgtttttagcagagatggggttacaccatgttggccaggccagtctggaactcctgacttcaagtgatccacccgccttggcctcccaaagtgctgggattacgggtggaagccactgtgtccagcacaggcacaaacttagcaggtgttccctcccagtgcagttgcacaagggcacactgaattctcccagcaaagttgtgtgcaacacattcacagtattgccagccagggaagctcccccaagccttgacgtctagagttttcgttaagggtcattgaggtaggaatgcagaacccacatgaataaccataaatatccagtctacaacccttgcagaaaacaaacatatagcatggcccagggcctcatgcatgcaaaagccagcatccaccatgaatcatattgttagcataaattatctggtcaaacgtgcagcaggacctacttatggttttcgacataaaaatcttaccaggcaagataccccaagaggttgttttcctgaagttggccctaattcattctagggtcagatatcagatagctgcggacagtgcctgtgtcctaaaacctgccaacattattcacagtagcaaatcctattctgtttatgctgcccctgccctgccttgccttgcctttctggtggaaaacacagcgcaggctctgggccttgctttctcctctgctgctgctttctaacctgctctggtgcttccacccgcatggtgtgctctgcctcctgtttctagggatctcttactataaacttcctccataataatcacttctgtatctgattgtcacaccctgcctgactaaatacaatcccaggtatattctagaatacacagggagcctattacaacatccttgggccaggcgcagtggctcgcgcctgtaatcccagcactttgggaggctgaggcaggactgcttgagcccaggagttcaagaccagcctgggaaatatagtgagaccccatctttaaaaagaataaatttttaaaaattggctggatgtggtggcatgcacctgtggtcccagctacttggcaggcttaggtggaagaattgcttaagcctgggagttcgaggctgtagtgggccatgatggtgtcactgcactccagcctgggtggaagagtgagactttgtctcaaaactaaaaataaaaatatgacctccttactgtggcctccaggacactacagaattcacgtccatctatctctgtgattcagtttatcttcagctgcagccatactaaccttgttgcacttccccaaacacgacaggatcctcctgctttcattcccttgtcttaggtgctctctctatgagaccctgttacctcagatgctccattcctccaagtccatgctcagatataactgtcttttagacatttcccaactactctacctccctctaaccttctatattgtttacttttgtggttgtggttgttctttttgagttactgattgttggaattaaaaggtccccgagggccagggacagtggctcacgcctgtaatcccagcaatttgggagactgaggtgggtagatcatctgtggtcaggagttcgacaccagcctggccaaaatggtgaaaccctgtctctactaaaaataccaaaattagccgggcgtggtggtgtgcacctgtagtcccagctacttgggagtctgaggcaggagaattggttgaacctgggaggcagaggttgcagtgagccgagatcgcaccactgcactccagcctgggcgacagagtgaaactgcatctcaaaaaaaaaaaaaaattcctcaagtacaggaatgcataattattttgctatgtacatatctgattttttagagcagtgcctgttgcaagataggcactcaatcgatactcattaaattaacaatatacacatatataaaacagcactttcacatggttatgagtgacctaaggaaaaacagaacaggatgacgttgtagtgggggctgttttaaattgacagtttggagctgggcgcagtggctcacacctgtgatcccagtattttgggaagccgaggcgagtggatcacctgaggtcaggagttcgagaccagcctggccaacatggtgaaaccctgtctctactaaaaatacaaaaattagccgggcatggtggcaggtgcctgtaatcccagctactcaggaggctgaggcaggagaaatgtttgaacctaggaggcggaggttgcatgagctgagttcgagccactgcactccagcctgggtgacagagcaagactccgtctcaataaacaaacaaacagacaggtttgggaaagcctctgagaaaggaatggttggcctgagctaagcgccattaccctgatccacctattgtaaccacctaatgggttcattattttccctgctccccagatagagtcgacttatcaagacaggataattgcaataaagggtttaattcacatcaatcgagctaaatgagagaccagagttttattactcaaataggtctccccaaatattttgagacgagcttttttgtttttgggtttttttgtttttgtttttgttttttttgagacagagtctcgttctccttctgtcgcccaggctggagtgcagtggcatgatcttggctcactgcaacctccgcctccagggttcaagcgattctcttgcctcagccttttgagtaggtgggattacaggcatgcgccaccacacccggctaatttttgtagtagaaacggggtttcgccctgttggccaggctggtctcgaactgcctacctcaggtgatccgcccgcctcggcctcccaaagtgctgggattacaggcatgagccatcacgccaggccttcaattatatttctgcaagatatgttccctgtctaaaagaattcaatttttaatgtttttgaaacttatgtgtttgctaaacaaatacgtgggggctgattttacgatctgaggccaaatccacaaactgattacagggtccaacaaatatttggcgagtgggaggagaggggtaagtgagctggactggtggcgtcctggctgtgagcaggcacagccgcaggcttcagggagccccatcgcggtgaccctggagagtggcctgaatcggacgtgaccttgaagcaaggtggttttggggtcgccggctgcacaaggcgcgaagtggtttagggtcacgggctgcacgaggctccagcacgtcaggagtgggcgtctgttcattcccacgtgcatcgcggctctctcctagttgacgcatgcacaccccgtgggtgtatgcgttgttcattcccacaacggccatcaccacctctccgcaccctctgtctccttccttctcgggcctcacccctggccctcgctttcagtgcccagcccggaccgcagcactccagttccgccccaacccgggaaccctggactgaggctcccgtttctgtcctttctattgggcgcacttccgatggcgtcaggaatttcagccaataggagccagccaggaagtacctctctgagcggttggtgccgggtataaaagaaggccgcgcagccacggctgctcacgacgccgcggatcccgaagcctgtgtagcagtgagacatcagtgaggctgcaggacgagcaggattggaagcgccccggccagaaagtgaccccccacccctttcaggaccctgtgaacgggaacagccatccagagggttcaggaaggcgtccgcgccctcacctcttctccccatgagctcccccagagctgtggtgcagctgggcaaagctcaacctgcaggcgaagagtgtgagagccagcgccagagaaaggacgcagggaaggctggggactgggccaggggtcgggtgcacagaagacacatgtgttgacatctcccctccctctcctcctccccaacgctcttcttttctccccactccctcccttccctccaattctttctttcacctctccctcccctactctctcctccccttcctttctctctgcctcttcttcacctcctcctcccctccctaccttaccttactctttcttcttccccttacctctccctccccctctccctgccttccccttccctctctttctctcctccccttcttcccctcacctctcgctccctattcccttctctactgttctcctctcctctctttctctccccttctccttccctcccctctcccttcctatctccctcctcctcctctctttcagtggctacagcaaaccaaacagcccagcagcccagcagcccagccatgtgagtcccttgggattggtatctggaaaaggaaggaaggtgggacgtggggatgaagaacagactgggtgtgtggggtgctggctcctgggaacgagaactactgatagggctgggtctgtgtgagaagggaaagcggcagaggaaggatacaatgaaagaggaaggggagcattggcatccctgactttccctccgcctaccctacctcccaagctgaggcttttttcttcctctcctgtcaggcggcgcctcacagtcgatgactttgaaatcgggcgtcccctgggcaaggggaaatttgggaatgtgtacctggctcggctcaaggaaagccatttcattgtggccctgaaggttctcttcaagtcgcagatagagaaggaaggactggagcaccagctgcgccgggaaattgagatccaggctcatctacagtaaggacagtctctgcttcctctttcatctttgacgtctgagcccagcattttccccaaatactaaccccaagtaaaccctgcacttgtaccttgaagacttctctgcagttcattccatttacactacctcctaccctgggtcagacactcgaatcctggttcctgttctccgttctcccctcacttgctcccagatagggctgttgttattctggtcccagcataatttgccacttgtgtgaccaggcagtgacggtggcatcatatgataggcctcagggagaaatctgactcttccaacattaatccttcagacaccccaatatcctgcgcctgtataactatttccatgatgcacgccgggtgtacctgattctggaatatgctccaaggggtgagctctacaaggagctgcagaaaagcgagaaattagatgaacagcgcacagccacggtgaggtgcgggtctggaggctctggggtctctgagtttactgtgggctggtgggagctctgtttgtggctgtcaggagggtccgcattgccttctgagaagtttacttctgaatgttattgtgtaaatttaatataatggcacgtatgttctacagctttatccttggataccctaattaacctcattgtatctccagaatattaataagtactgcgtataggtttggattctttggttataagcaacagaatctaactccactgccttatgtaaagaaacatattgaaaggctctgaaggagttcactgaataaatagctagaactggcttagagataggtacaaagagatttctagagggttccggaaagggaaccatggcaatgattttcccaggagcaatggtccaatcagcttgctgtgtcaggatgagtggtcttccatctttcctcctgtttctgtttcacttcctcgggcctcaagtcctgtgagagatcatctgagtggctcaatgtaggttctatgtctggctacttgctgtgctaggacaacagggaggatctgtgtccatgttaccatccatcctataagaccacataaaaaggagaggaaaaccacaccccacacaccagtaactggtgcaatttaaaaggaggaaatggagttactggaccaaaaagattccactgtaatcatacaattcatggtaagtgttccacctcagacggaaattgtggcaggcttcacttccagggtgacttttctttgcacccacagataatagaggagttggcagatgccctgacctactgccatgacaagaaagtgattcacagagatattaagccagagaacctgctgctggggttcaggggtgaggtgaagattgcagattttggctggtctgtgcacaccccctccctgaggtaggtcaggtggtggtggtagggtgagttctgagtaccagttaggaatgacccagtttaatgtatttcatgtgtccatgtgtaaaacctagatacgaacttggggtttctattggaatactgcctttttcttttcttttcttttctttttttttttgagacagagtctaactctttcacccaggctggagtgcaggggcacaatctcggcctcccaggttaaagcggttctactgcctcagtctcccaagtagctgggataacaggcatgtgccaccacactcggctaatttttgtatttttagtagagacagggttttgctatgttggccaggctagtctcgaactcctgacctcaggtgatccgcccaccttggcttcccaaagtgctgggattacaggcgtcagccaccatgcctggctgaactactgcctttttcttttctttttttttttttttttttttgagacagagttttgctcttgttgcccaggctagattgcaatagtgtgatctcggctcactgcaacctccccctcccaggttcaagcgattctcctgcctcagcctcccaagtagctgggattacaggcatgggccatcacacccggctgattttgtatttttagtaaagacgggtttcaccatgttggtcaggctggtctccaactcctgacctcaggtaatctgcctgcctcggcctcccaaagtgctgggatcataggcatgagccacgatgcctggccaatgctgccattttcaaacacctatacttgatatgtattcgtagatttaaataatgtggtccaatcaaaccttttattttctgatctttgttaatatataactataccagtaagtttgcatgtaaataaagtcattgctccacaattccaaaggagtgcatttttctgtatgaatgattttcatacagaaattttcttaccataatttatttacttggctctcattgatacaccatcagtttgttctagatctttcttaatgctgagaatattcttgtgaaaacattctggagcatgagctaaatcactgtgtgaataattccaaaatatggatttattaatagtaggccccagtacttttctgaaccttgatccatattaaaaatttgtctctccaaactcctgtgcttgggagggactttccagggtgtcctagggtctccacatctcaatgaaagctggggaaggagaatttccctcatcctgggcctctgcttagtacttattcccttttctgccttcctctaggaggaagacaatgtgtgggacactggactacttgccgccagaaatgattgaggggagaacatatgatgaaaaggtggatttgtggtgcattggagtgctctgctatgagctgctggtgggatatccaccctttgagagcgcctcccacagtgagacttacagacgcatcctcaaggtgggacagtcacctttgggcattcatgggggagctggtcagtgatggctgctgggctgtgggcacacacacacacagggttgtcttctgtggtccagaacagcgccttaacaaggctcaaagaagagggaggacattgatcaaagaaattaaccagacttctctttcttctttcctggcctcatcaggtagatgtgaggtttccactatcaatgcctctgggggcccgggacttgatttccaggcttctcagataccagcccttggagagactgcccctggcccagatcctgaagcacccctgggttcaggcccactcccgaagggtgctgcctccctgtgctcagatggcttcctgagccctgtctgcctctgttccctttgtgtgtgttcagggagctctcctggctctgccacctcatttgtctttatttttttctcttttaagatgtaagatgctaattaataaaagctgaatcatttcataccagctcttcatagttgtgtgagttattatgtgactgggtagaatctttatttcttgtgggaactctttcccatgagagctgcccaaggttgttctccctgctacccccaccttccacctcgggagatggtgacttcattcttctgaaaactcttgcctactttcaggtcaggcacggtggctcacgcctgtaattccagcactttggaaggccaaggcaggcgcaacacttgagttcaggagttcaaggccagcctggccaacatggtaaaaccctgtctcttctaaaaatacaaaaattagctgggcgttgtggcgggcacctataatcccacctacttgtgaggctgagacatgagaattgcttgaacctgggaggcagaggctacagtgagctgagatcgtgccattggagtccagcatgggagacagagtgagacaccgtctcaaaagaaaagaaagaaaactcttgtctactttctgcagataaattccctgagggtacataaacctgccacctatcacagtggctccttgatccaacttactattctccatgttttcaggagtatgccatttgtaaaacaggactgtcatcaacccaaaggtccactctctttttatggacatcaatatgctgctgtctcagaaataaaatgtttcactgcacgtcagtgcaacccacttcttaagtgaatacactagcacctctgtgttgtgttgcactctgatgacattagaataagtcattcctcataataaatgtaatatcacctcttctgaaattactgcatgctgcaatttggggagtggccttccagccttctgtaaccttctgtgacagcttcatgtggcagctgctccctgcacccattataaactgactaccacagtaagcatctagactcctcagctgtaagctcaaatgttttttgatcaatgcagtcagttacaccagtatttctcctaactttagttgttaagcactttatatggagtttgccttgttaatgttactcctatcattatattctacaaagtctcctcattgtgaaatatccagcagttgcaggcatgatttctgctatgaccagacccactacgtaagcataaataactcagccacttcacttggatgaaaagctcccactattgcagatctataagttaaatactccaagacattggttcatggtttttaacctgcactttcagtatttacctcttttttgttttttctttcttttacctgcatggggagacacagtgcttacctctatatgctttgcttcatcctatcagttttcctgaattaacattttaaacacttggcaattcctaataaattaactggttcacacatataaactcttacacattttaggtgctggataaacacatcactgggcacatttttggcaggtaaggatagaaaaatcactagggcctcagcactgatcaccagatgatatatgtttaaataatgaaaactctgtcatgctttacatgagggatttgaaagtgtccccaggccgggcgtagtggctcacacctgtaatcccagcaatttgggaggctgaggcaggcagataaacatgtgaggtcaggagttcgagaccagcctgaccaacatggtaaaaacctgtcttgactgaaaaatacaaaaattagctggccatggtggctgtaatcccagctacttgcgaggctgaggcacgagaatcacttgaacctgggaggtggaggttgcagggagccgacattgcgccactgtactccagcctgggcaacaaagtgagactctgtctcaaaaaaaaaaaattgtcaccaatatctacatagctttcttcagcagcactgattccagacattccatgatggaatataaatatactaactttaatatctgttctgcatccaaagcgaaaactaatttaaccctacgggtcatacacatatggaaaggagaattattcctctcttctaaattgggcaaattagtattgtcaatgatgagtaacagtgtcaacagcttgcacgctaattaagcaacatttctcaataatctcattttacaaataataccttctagaaaattgattccatctacatttccacccagttaacatcctgtcatgatactttctccactttcaaatctctggagggcattttctgcacaccttgtttccattttcataaccatatgtattgtcaaatcattgaaagctggattttattctctaaccttcatagtcatgagaagaaaaaaaacagtcaccaacggagactacaaaggttttgtataatatgattttttttttttgagacggaatcttgctctctggcccgatctcggcccactgccgtctccgcctcccagattcaagcgagtctcctgcctcagcctcccaagtagctgggattacaggaacccgccaccatgcccagctaatttttgtatttttagtagagacggggtttcaccatgttggccaggctggtctcaaacacctggcctcagctgatccacccgcctttacctcccaaagtgttgggattacagccgtgagccactgcactcggcctgtataattcttaaaagattgttatgaccctaacatgactttgttgctttcttgtttgcaaccagttagttcagggttgtcaaaaggccaaaattacaacaaatttagttttagatctaattgacttttgtttgtgattcatgaattgaggcaatctctgttctacacaatagaaattagagttcccactgggcaatggcagaacagtgggttttgtaaggtgggaacaataaaatagaacaatagaaaaaaaagctgattggttaacagattactttttctaagggttaaagcagaggggacttcctaatttcactaattcaggtagactgaaatctgcttttaggaaaaactgggatctgtctgcttccttaaaacttcagtttgattagatgacatttagtatgagagacgccattttgatttggtcagtgaggcctgctgtaggagctccaaaacaatggcctcctgtaatttttgtttaacaatgttcacctctttccattcctttctccatctatgctcattttttttcatggtcttgtccagtatcataacttgaaataacagtgtttgccaaaaacttccagatttttatgtccaggcacaacttctctcccaatattcagtcagagattgaactgctgtgacacagacactctgtggtcatacagacatttcaaactgatcatgcttaaagttggagtcatgagctcacccagtccaagactccccacgttaaggaatgtcaaatctactctaccagggctctcagccaatacctaaagcaaaagttgctggaccatgtgaagaccaagcttggccaaagaaggcccaagagagacaatgcatttgcaacatgtcccagctggacagggtcttgctctattgcccagactggagtgcagtggtgcaattacaggtcattgcagcctcgacctcctgggctcaagagatcctcccatctcagcctcctgagtaactggaattacaggggtgtgccacaatgctcagctaattaaaaattttttttgagtaggctggatgctgtggctcatgcctgtaatcccagcactttgggaggccaaggtgagtggatcacttgagcacaggagttcaagaccagcctgggcagcatggtgaaactgactacaaaaactacaaaacaaaacaaaaaaaccctcaatttgctgggcgtggtggtgcgtgcctgcagtcccagctacttgggtggctgaggtgggaggatcacttgaaccctggagtttgaggctgcagtgagctgtgatcgcgccactgcactatggcctgagcaacagagcgagaccctgtctcaaaaaatatatatataaatatatatataaatatatatgtgcatatatatacgtatatatacatatgtatatatacgtatatatgtatatatgtatatataaatatatgtatatataagtagagagagagagagagagagagacggagtctcactctgtcgcccaggctggagtgcagtggcgcgatctcggctcactgcaagttccgcctcccgggttcacatcattctcctgcctcagcctcccgagtagctgggactacaggcgccagccaccacgcccggctaattttttgcatttttagtaaagacggggtttcatcgtgttagccaggatggtctcgatctcctgatctcgtgatctacccgcctcggcctcccaaagtgctgggattacaggcgtgagccaccgcgctctattttttttcttttctttttcttttttttttttttttggtaccaatgaggtctcgctctgtcgcccagactgttctcaaactcctgtcctcaagcgatcctcctgccacagacttctgggaccacaggtgtgcgccagcacactcagcttattttaaaaaaattttttttttttttggtagtctccctatgttgctcaagctggtcttgagctcctgggctcaagcgatccgccccccttggcctcccaatgcgctgggatcccaggcctgaggcatcgcgccgcccgacgtccccctttggttactctgactgcccgctgatctgtataagaggatccggaggggaaataatgcaaggtggaagtcagagtccggagcctggtccagggtctctgcactggccctgaccctggcaaatgtccctgactcctggggctcgatttcctccggccaagaatggacggtctcgcgcttggtccctggcctccgagttgtgcccccaggacagaggcaggtctgagccgggctgtaggcccgctgcgacttttacaccgaggcctgccggctcaggatctgtcccctttgcaggtggtttgtagagaaaaactacattaactacaaggcattgccaggtgcgacggcgggccctggggccaatgatggtccaggacaggggcgtttcctgtgggttgcgaagcttggggcgggacttccggcatttggatgggacgtaatttgggagcgacggttccgtccacgccggctctagggagggggcggtgttccgtggccgcctccctggcggcgctggggaaatgagcaggtaggaggccgacagcgacctccgcgtctcggagcgaaccgtgagcctccccgtaacgagagagtttgactgtcagccaaggtcaccgggcccggcgcagggaaggggtggggctcggctgagcccgcgagacccgccctgctcgccgcagcccccgccccgctagggccacagggtcccggtatggcgatggctttgacggacccggcgcaggtgagtggacaaggtttcggccttgctgcttttctgctagttcggggaagcctcctgggcaggccggaagccaagacagccacaggattcctctttgtagttttgtttgtttacgaaacgtggagcaggctcgtcacttagtttatctcctgtcgtggtagtacctgagagactgaatattgaagcggacagtaggcagactatacatcgattatagggctgtgacgtacaatttttttgtagcaacctgcccaggaaaccagcctcctgttctgcaataaactactctggaagccagtctgccttaagttagtcttgcaaggagctagattactctctggtgacatttcaggaggctaaacggtaactcctggaacagtaggccccaaataggacttgatttgtaactgactgttctaatttttgcctccgcctccaaaagaggaccaagcagagaaagccatacgtgctcagcctaaccaatcacatacgatgccccacttctagttagcccttctgcagctttccactgctaaagtgtcaggcctctgaaagctgcttaataattgcttgaaggatggatgaagttccactccagggactcccgtcacacacatcatccgaactcagccttggcctgcaagtccctacccggtccactatggctgaccacctctgtccttgtttccttcctttcctccctggctcagcgcttcagacacaggtccactatggctgaccacctctgtccttgtttccttcctttcctccctggctcagcccttcagacatatcaatctgatcacgcagagttctttcctacccctcagccttcacctttacagttcattcagcctcagacactatcctcagatctctgcaagaccctttcacatcttgttggctctgctcaaatgtcacttctttaaagcggcctttcatggcagttcagactaaagtagtccccttctcacctgcccttggtctagcgtttttgtatagagaatctggcaaagttttagacacctactgagttgaggtcttaaaggattttgtggggacaaagagcataaataataacacaagaactgtaacggttggccttcattgagtccttgatgtgaactgagaaatgggcattatttatcatctcatttaatcctgatctccttaaagtgacattctattataaacactgctgtacacaagaggaggtcaagactccgacctgtttagttacctgctgaaagtcacatagcacttaagtaacaaactcatatttagcgtgtggaccaccagagcctttgtttttacagacagttggctgagaagccctgaggtgaactttgcagtctttccagcaagtcacagtggccattggaagcgaaaggcagacattccactagagaggactgtgtagacaaaggcaaagtgtgttggttgtttaaggaggtccaagaggacttatgaggttaccatggttccccccatccccacctgctgagacatggcctggaagggcaaaatcctgtggtcttttgttggatgttcgtcctgccttcagcctatagggcattttggccagtcataagcctgggttctcatgaccacagcctgcattatcttcagccacttgagttttctggtcctgaagcacactggccttagggatacctgctggcaggactcagggaaggaaaaggctaatggttcattatgcaatctccctggggtccaggggagaggatgagctggtccaggcactgcccctcgtcaggcatttggtacttgtgaatttggtgatgagggttttgcccacatcttggggatattttcaggagctgctaaaatagattaaatagcaaaaatatgtagaaatgcttcacaactgtattatagtagattcacgtgggtggtggaggattattggggtcacagtattaaaccctgaagcagagggacctgggttaaaatcctgtctcttatatataaatcatgcttataacatgtaaaactctggctgaacttggtgctcacacctgtagccccagtgctgtgggaggctgaggtgagaggatcacttgaggctaggagttcgagaccagcctgggcaacatagcaagatcccagctctaccaaaaagaaatagttgggcgcagtggtgcgttcctgtagtcccagctacttgggcggctaaggcagaaggattgcttgagcccaggagttcaaggttacagtgaactctgagcatgccattacactccagtctgggtaatagagtgagaccctgtctctgaaacaaacaaacagaaaacacaaaagactaggagaatctgtggagctcccttagcctcaggtcagtgactgtgacatggaggtgattggcggtggtgtttagtaatacttcaggggctgtgggaggattaataaaatcccaaagtccagtaagctctgaataactcatgtctgttattgggaaaatgggaattctgtattcatctgaaaattgaggcagagataaatgaggtccctgaggtcacaaaactggcaagtgtcagtttcaggagtttggattcaaacttgagaagtctgacttcagagtttgggacttgtagttgctttaaaacagaacatgaagcttcagcatgagctggaccagtgaggctcaggcactgtggttgtcaacattattgctattattattgtcactatttcctcatttctttgaggtcctcgaactctaattgtctacatctcgccatccacgagttattgccattgtcttctgttattctttgatggctcctatataggaggcttttctcttttacattacagtaatctgtccaaagcaatgtctgccttcctccttcagcctggtacaaagttaggccctcaggaggccctcagtgacttgggccttgatcttgttgcaccttttccagcaaagcacatgcaatagtcccacagcaaactctactacctctatttgacatttcaggtgtctgtgacctttgatgatgtggctgtgactttcacccaggaggagtggggccagctggacctagctcagcggaccctgtaccaggaggtgatgctggaaaactgtgggctcctggtatctctgggtaaggccttccccctccaccatgcaggggatctgccacctccttcgttccaccctctgactccaggcctgatgggtcaagaagtcctctcttactggccttgcctccttcccacaaattcagtcattttctacaacactcacctcttccttttttttttttttttttttttgagagggagtcttactctgtcacccaggctggatgcattagcacgaactcgggtcactgcaacctccgcctcccaggttcaagcgattcttctgcctcagcctcccaagtagctgggaagctgggattacaggtgcccaccaccatgcctggctaatttttgtattttcagtagagatggggtttcaccatgctggccaggctggtctcaaactcctgacctcaggtgatccgcccgcctcggtctcccaaagtgctgggattacaggtgtgagccaccacgcctggcctacactcacctcttcctatacagtctccatgcatcgctttggacaagaaataagagtactctttggctctcagccaaaggagagaagctggtggaaggaaatggggtgttttgcagacctcaaaggtaggattgccagctgtatgttatgaggggttgaagtaggaactgagaaccgccacgatggggtcctggtttctctgtctgggtctgctcatgtcactgtctactctgtatggttttttctgcctcagcgagttcaggggaagagtaaccaccccaggttttactgtttgtgacccctccttcccctccagatttcttgtctgtttctctggcctctgtggggcgtgtttgaggcagcaaatgctgctccacctccagctcatacttgcctccatctctcacccactgcccagcatagactggcctctgtctgcagttttttttttgagttccagagcgggatctgcctgggtgggcctggttgctcatgtatctgctccacagcccagtctgtggtgtaagggttggtgggatgttcactaagaagggttgagtcaggcaggccccaaggagacattgaccttccgtcccaccaggtgttattctaaacaaccttcacgtccttcaatcaccttcacatcctctgattctaaagtcactctgctgcagccttgctgggcttcttgctatttccccaagtgcccacccacctcaggccattgcatttgctgttctctttgatgagtgttctcagggtaattcagcatttcacatggccgccccttctcagcaccacttgcctcctcacccagcccttccctgaccaccgaatcttggggaggcccctttctcaccatagcctcctccctttacctttttaatgtctttctaagctagtgtttctcaaacagggacgatgttgagcttcagtggacactgggcaatgtgtggagacattttggttgttaaaactaagatgatgggccaggtgcgatagctcatgcctgtaatcccagcactttgggaggccgagatgggcggatcacaaggtcaggagatagagaccatcctggctaacacggtgcaaccctgtctctactaaaaatacaaaaaattagccgggcgtggtggcgggtgcctgtagtcccagctactcgggaggctgaggcaggagaatggcgtgaacccaggaggcggagcttgcagtgagctgagattgcaccactgcactccagcctgggcgacagagcgagactccatctcaaaaaaaaaaaaaacctaagatgataacattgacagctagtgggtggagatgctgctaaacatccttataatgcacaggacagatcctttctcctcctcttcccccgatctcacaaacaaagaattacctggacctaaatgtcaattgtgctaaggcgagaagctctttttcagagagtgcttggacagacactacatcagctggtgctgagagacacttgaggaagttgttcttttatttcttctcgtcttgtctccttagcatttgaggaaaactctggtttagtgctgagacttaacgtcctgcaaactgttggtaatttccccttttctacagagggagcagccttaggctcacagccctgaacaagcagcatgagctcacagggaccaaagagcactgtttgtttgtcttgagacagagtctcgctgttgcctcggctggagtgcagtggtttgatcttggctcactgcaacctgtgcctcctggattcaagcatttctcatgcctcagcctcctgagtagctaggattacaggcaggtgccaccacgcccagctaatttttgtatacgttgttttgatttattgctacattttcatggttacctgccatcaagacaagtgactctggattttccatttaccagagtgataaggattccatttttgaagaaatctaagaaaaataaaaagtggatcacttttaagaaaagcagcccgggcatggtggctcatgcctgcaatctcagcactttgggagggcaaggcaggcagatcacgaggtcagttgatagcgaccatcctggccaacatggtgaaaccccgtctgtactaaatatacaaaaattagctgggtgtggtagcgcatgcctgtaatcccagctactcaggaggtggaggcaggagaatcacttgaaccagggagttggaggttgcagtgagctgagatcgcgctactgcactccagcctgatgacagagcgagacttcgtctcaaaaaaaaaaaaaaaaaaagaaaagcagttaacagtccagatccccagagcactgattgggtgtctcaggcctgttccaggcagtgttcatgctccatttattctcacaggatccctgtcctcagcaaagtaaggaaaatttagccactcctgtgagtccctcatccagtttaacttactcagcacagatgaaacaccttcattttatgaagctatcactgaatgtttttgtgtagaaaaaattcttctcttgtgaacttttttttttttttttgagatggagtttcactcttgtctcccagactggagtgcagtggtgcaagatcatagctcactgcgatcctcacaccttaccgtctccagtagctgggactacagatgcgagccactgcgctgctatatgaagtttctgtaaatatccttatgtcaccatatcacagtaggatgttcagtctttaaatattttaatggttcgtgaaatgctggggtctggagtcactgacctgcccctcatcctggccgctggtccctgaggatgaatcctccagctcacatctctgcctcgtcaccaccctctgccacccactctggtgctcgtggtttcctccttactgtatttcttgggagagtagggtttgaagccagaacgctggtgtccagccccagctctgctctttaaaaactccatggccttgggcaagttactgaacttgcctgtgcctcagtgttctcattgttcaaatgaggacttaaccatattcgcatcccagggctgttgccagggtcaagggttattttatgaaaaggctcagaacagcacctgggagaccaggctgcgtgcagggagccattacaatctctgtttccaccagtactattaccgtcgtcctcatcatgattattgtcgttggcatgccttgacctggcactttctgggcagcgttgtggagctttgtggttaaacagcacagacagagatggcaggacctgggtttccttattgactcagccattctccagttctgtgctcttcagcaaatcactttacctccccgagcctgggtttctttgtcaacaaaatggtgttgattatgatatggacttcctgggtataccgtgaggaaatcctcaactggaatcctcatttaatggctaggcatggtggctcacgcctgtaatcctagcactctgggaggcctaggcgggtggatcacctgaggtcaggaattcaggactagcctggccatcatagtgaaacctcatttttactaaaaatacaaaaaaattagccaggcatgatggcacgcgcctttagtcccagctactcaggaggctgagtgagcggagatcgcgccactgcactccagcctgggcaacagacgcatttagtctttggtttagaggaagagcattataaaacattgcttaggatgttaaaaaaaaaaaaaaaagacttagataagtgaagatacataccttgttctgaatgaaaataatcaatgtttaatatttaaagtgtatcactttttctctaagatattccataaatattgttcactttttaatgcatttaaatgcttggcatagtcccctggacatggttatagcctataaatactagtttttgacttactattaggagtagagattctgtggcagcatgacatgccctgcccttggtttctagatcacgtgctaactttttgttcccatggatgggtgtagcttcattccaaggtctggtccccatcctgaagtcccagactagattgaaggtctttatttcttttcacccacatccatgtgtccacttgctttctccataaacagggtgtcctgttcccagacctgagctgatctaccacctagagcatgggcaggagccatggaccaggaaggaagacctctcccaaggcacctgtccaggtaggagccaagatctgggcaggtcggagtccctgctggcttgagacttcgaggagaccactggccctgggatctcttgggaagcttctcactgtggcttctctaagggtttgggagccttggagccctttaacctgtggtttctccgtcctcccagccccatcgcacttgtcgccactcctggggaggagtgaggtgtgtgaactgagactggtcctggggctgcagccttgtgtgccggaaccctggttagccagtcatctactctgtgaccccagtgaagtttgtatatgagtttggctaagttaataccaactgctgtatccaacaaactccaaaatttaaatgattcacacatgaaaactctttttcactcataccaaggtctgtgtgggtcagcagggaactctgtaccacacagttattcaggacctagagtccttctgtcatcaacctgttgctttaaggttgtcctgacatcttcttgctggtagagaattaagggaataaggaaagtcatacccacttccagacctcccctcacatctcacccatgggaactgggcatttggctgtacttgggtccatgagtctaggaattgtggctgagctgcctgtccaaggagaagagcagatggtctggtgagcacctactcagtccactacactcagtctgttcctgaaaaatgatattagaaattatttttataaaaaacaaaaaagaaaaacattatttttatgccattgggcagtttgaagttgtaatcatgtgatacattaatgcataaaactgcatagtttctgagccatagtaagtgacttatcaaaataagctatgagtgttactcatgtcatataaacattgatgagtgatgatacgttacatttccttctgaactctggggaatagggcctttcttactctcccaatttctctttccacttatattctgcctatcagcctctcccaccttctccttccacccattccctgagtgtcaatcagacactaagaagcagtagtttgcccatgtcttcctatatctcctgttttccaaaaacctcagggtgacatttgaccttctgtgtcccacactcaggctgctgagggcactgaggccatctgtcatgtgtgtggattggtgccactgcagagccttggcctctgcccgcgtgggttccttgagctgctcatccaaccctgagtgtctgtgcagtccctgttcagcccttcagagtctgttccagattgtcccctcctcagtgccacatctgcacttgaaaatctcaaaagcacaaaactcaacatgcctaacaaggaacccatgatcttgctcactcctgccacctcccaagtttccgtgaatggttctgccatccaggcagattaggggactggccccaacctcagacaagtcaacccctccacctccatgagtccctgcatccagcctatctccacagcctttcgatttcacgtcatgcatgcctcctgaattcatccctctatcacctccatgagacctatccttctgcttttttcttttttgagatggagttttgctcttgttgcccaggctggagtgcaatggcgcgatctcggctcaccgcaacctccgcctcccaggttcaagcgtttctcctgcctcagccttccgaatagctgggattataggcatgcaccaccacatccggctaattttgtatttttagtagagatggagtttcaccatgttggtcaggctggtctcgaactcccgacctcaggtgatctgcccgcctcggcctcccaaagtgctgggattacaggcgtgagacaccgggcccggcccccttatggtcttactctaaactcttatcatcttttttctaggggatgttaatagactcccaaaacttaatctctgtatctgctttgtgcctctggtcagctctttgtcctgcgtggggtactccagcattcagaccttgttccagacagttaatatttccccagcaactcagcatatgactgctgatgtattagcaggttttcgtgttgacagtgtcatctacttctattgtttaatcggcagtccttacacattcctctcaacctctcatatcggtagcttctcttttcccctggtggaagaggtcttacccttggccacggccagttttttcaagagtttatattatacgttttcatggacgttttttcttcacttatattccgcttgttttgtaacttcatcctttctgtactcaacataaaaatatgctcaacttccttacccttgaagaaaattcaacaattcagtgttcatggttcacagtgtattcatatattcattcactgtctgagcacttaattgtttacatgtttttatatcagtgatgctgtggacatttatgtatgttgttcatctttcacatgtgtagggacacatttttgatgtttctggagtgaaataattggattatagattatgcaaatgttctagtttgcaagatcattctcattgttttctaaagggcctatatcaaaaaattcctctcaggaatttttggaaggttccattgatccatatcctatctaatacttgaaactataaggcccctcaatttttgccgattaaatggacacaaaatattatctgttgtgctcttgatttgcattttcctcattggtagggtggtttagtgtctttcatgattctgagccaatctatattttcttctgtgagatgttatttggtgataaatgcctttttttcaattaacttctttggctttctctttttgattttatttttgtacattatagatacctatcttttatcagttacatttgctgccggtatattcttctagtttttaattttgtccttccactctttttaaagtatcttttgttcaatgagttccttacatagcgtagtctgatttatgttttttttttacgtgattaatgattttgtaccttgtggaaaaaatgttgctttaccctaatgtcaaaaaggtattcttgtttattttattgtaagttgtaaaacttgccatttggcattcaagtctttatcaatctgaagttgattttgagtatagaatgtgatagaatacaatatttccattccccgtgttggtagccaatttttctagctctaattccttagtagtctctcatcactgaggtgctgtgcctctttgccatctaccaaagccccatctatgtgcaaggggatttctgagctctctgttcttctttattcccagtttgcattatgtctgtgccagagtggtacctctgccttatgagctctgtcctgagagtggcactgctcttcacagctgtcacctaggtcagaatcttgggaatcagtccccctgtgcctcatctttccctagattctcatcaccaccaccctctcatgcactgtagctcatttgcatattctttctcctaaggctatagtgtctttctcacattctctcgtgacaagtgggacttacttcactgggtaccttctattggaaaactgccttgatctttttctacccaggattagccaaactcaagataaggacacagtcctccaggactttgtcaagtctacccaaatcctcttaattccaactgcaaattcagggatttcctgaaaccaaccttaggtttcataacttgctaaaaagactcacaacactttctaaaacctattatactcacagttttgtttattacagacaaagcatacaaattagaagaggacacgggatgtggggctgaaggggttccaaacacaaagcttcctcagtaacttgttacccacccagcattgagtgtaaaatatgtgcacagagcattgcaaacccaggaaactcactggagctctggtttttagagtttgttgagcttcattacacaagcacggttaatcgagacattgcccacattgccatgtgaagtttccagccttcgtcccttttccagagttcagctgatatcttgtggctcagagacctaaccttctactcactggttggtctttctggtgccaccagacctcagccagagtcatctatttaggataaactatttaggtacctataatgagttacctttatataaatatttagtctggaattgaagcgatatctccactctaggccctgtcccctcacctggtctctctgcctggtctccctttcaaggagtcaggaatccaaggaaaataaaagaaacaaattatagatctggggttcaagatggcaaaatataacagacataaaggcaccatttataacttcattttttttactgaagtggtgagtttgtttcttctctttttacattactaacaagcccttctgtgtgttggatttctttcaggtgacaaaggaaaacccaagagcacagaacctaccacctgtgagctagccttgtctgaaggaatctctttttggggacaactaacacaaggagcttcaggggactcccagttggggcaacccaaggatcaggatgggttttcagaaatgcagggagaacgcttgagaccagggttagattcccaaaaggagaagcttcctggaaaaatgagccccaaacatgatggtttagggacagctgatagtgtgtgttcaaggattatacaggatcgagtctccttaggagatgatgtccatgactgtgactcacatggatcaggtaaaaatccagttattcaggaagaggaaaatatctttaaatgcaatgaatgtgaaaaagtgtttaacaagaaacgcctgcttgctcggcatgagaggattcactctggagtgaagccctatgaatgcacagagtgtggaaaaacctttagcaagagtacatacctcctgcagcaccacatggtccacactggggagaagccctataagtgcatggagtgtgggaaggcttttaatcggaagtcacaccttacccagcaccagcggattcacagtggagagaagccttataagtgcagtgaatgtggaaaggccttcacccaccgctccacttttgtcttgcataacaggagccacactggagaaaaaccctttgtgtgcaaagagtgtggcaaagcctttcgagataggccaggtttcattcgacactacatcatccacagtggtgagaatccctacgagtgcttcgaatgtggcaaggtcttcaaacacagatcatacctcatgtggcaccagcagactcataccggggagaagccctatgagtgcagtgaatgtgggaaggccttctgtgagagcgcagcgctgattcaccactatgtcatccacactggagagaagccctttgagtgcctcgagtgtgggaaggctttcaaccaccgatcctacctcaaaaggcaccagcggattcacactggggagaagccatatgtgtgtagtgaatgcggaaaggccttcacccactgctctactttcatcttgcataaaagggcccacactggagaaaaacctttcgagtgcaaagagtgtgggaaagcctttagcaatagggcagacctcattcgccacttcagcatccacactggagagaagccctatgagtgcatggagtgtggaaaggccttcaaccgcaggtcaggcctcacaaggcaccagcggattcatagtggagagaagccctatgaatgcatcgagtgtgggaaaacattttgctggagcacaaacctcattcgacactctatcatccacactggagagaagccgtatgagtgcagtgaatgtggaaaggccttcagtcgcagctcgtccctcactcagcatcaaaggatgcatactgggagaaatcctatcagtgtaacagatgtgggaagaccttttacaagtgggcagacctcagtcaacatccaagaacttttattggggaaaaactttttgaatgtcaccactgaggaaaatcttttgcaagaggaagcatcttacatggcatctgatcgtacataccaaagagaaaccccacaagtgtcttcactgtgagaaaaccttctgttgccaaatgtcatttgtcacctaaggagtcatattagaaaatcacgcagcttagagccttattctccatccgaattcatcctggaaaaacacccagtggttattacgcacttgggaaaacctttagctccatctttctcattagtttacagtgcaatgttatctcaggaatttttataaacagaaagaggtgacatagaaaagaaaatgaaatgcagacactgcttttatactgttgtcttgtatgtacatttctgtcctgtgtcaggaaagttagtaagggaaggtctggaaacttactcaatgtctttgttctacaacattgtctcttcttaagaagcattgtttttatgagaaataatgaagccttgagttatgaaatacttttatatttaaggattaaaagaaacatgaatgcgcacattttattgtaccacttaatactgtttaggtctttgattttttaaaaaaattcttttttaatgggttttaaacactaacactgagaatttttcttgattcccatctgttggtttacttgattgctatagctgtatggtaaatctcaaaattaggtaatgtgatttcttttttcttactatttttatttaaaattcatttagcattcctagtttgactttccatatacactttaggattggtttttctgtttttcaaatattcttgcttggattttgatagaaattgagttaaatctatagatcaatgtgttggaaattggcatcttagtcttccaattcatgaacatagcctatcttttcattatttaaattttctttgatatatttcattactgttttatagtttacacagtataactcctgcacatttaaaataagaattatagctgcatagttttttgagtgattgtaaatggcattgatatttaaagtttcaatattcacatgatgttggctagtatacagaaacattattttttcaatcttattttgctgtcttgcaaccttcctaaactcattatttcttgccatttcttttgggagaatccttaggattttaaatatagaaatgtcatttgcaatttgggacagttttatttcttgcttcccatctgtataccttttatttgcttttctcatgttattgtactaggtaggatttccagtgtgatgttgaatacgaatagtgacaagttatccatgccttgttcctgatattagggggaaatgttcagtttctcattattatgatgttgaaagttgcttccaaagagtttctctatcgagtttagaaagtttccctctattcctaatttgctgggatttttttggttattattaataagtgttgaattttgtcatatgctttttctccaccaattgatttaattatgtgatgttacttctatagtcagttgatatgatgtgttaccttgattgagtttcaagtattgaaccagcctcacatctttgtgataagccctacttgatcatggagtataattttgtttgtgtactatgctacagtatttcatttgctagtattttgttgaggaagctttcctctgatttcatgagtgataatctgtagttttctttcttcaactgttactgtttggttttgatgtctagatgataactaacctcctaacatgaattggaaggaattctcttctgtttttttggaagatcatgtgtagaattggtgttatttgttcctttaatgtttggtagctttctccagtgaagaagtgggacctggagattttccttttgaatgctttttaattatgtatttattttatttaataggtatagaactattcagagtatttcatattggatgaatttttatagattttcttaaggaagtgttcattttatgtaaatgttctaatttgtagcattctttgaaatatttccttttatcctcttgatggcagcaggatctgtacttatgttccttgttgtattcttgatattggaaatgtatcacttattattgtcagtctttgtagacatatgtcaatttcattgatcatttcaaagaaatagcactttatatcactgatttttctccagtctctgttcttaatttcactgatatctgctctgatgtgtattgtatcctttctcctacttgctctggttgtatttgactcagtggtttcctgacgtggatgtttaggttattgatttgaggctttttttcttttttaatataagctttaagttctatacatttttcttacactgctgttagtttcatcccacaagtcttaatatgcttttgattatcttactcagttctaagattgcctgattccttttgagacatcttctctaacccaggaattatttagaagtatattgtttaatagtgtttggagtattccctgctatttgttattgatttctaatttgttttgcatttgatgttactgttgaaatttgttgactttttttccttatgacccaggatataggctgtcttgttttacatagctgcttgaaaagaatgtgtgttctcggtcatttggtggagtttctgtaaaagtttgtatgatcctgttagttggtggtgttatttaggtctcctgtatccttgctgattttctgtctagtatttctatcaattgccaagagaaggatgttgaagtcctgagctataattgtggaattacctattcctcctttaagttctatcagtttttgctccacataatttaaagctctgttgtttggtatatacacatgtaggtttgcttagtattcttggtgtattgacccttttataattaagtaatgtccctttttgttcctgttaatactcttatcaatttttatctgatatttgtgtggtcagtcttacgttttggttaatgcttgcatgatttacacttcatcatttttttaaaccttatctatatcactatattgggagtaagtttcttgtgaatggcgtatatttgggctgtggttttatatccagtttgcgtatctttttttttttttttttttttttttgagacggagttttgttcttgttgcccaggctggagtggagtggtgcgatctccgctcactgcaacctccgcctcctgggttcaagtgattctcctgcctcaggctcttgagtagctgggattacaggcatccgccaccatgcctgactgattttttgtatttttagtagagatggagtttcaccatgttggccaggctggtctcgaactcctgacctcaggtgatccacctgcctcagcctcccaaagtgctaggattactggtatgagcaaccacgcacagcattttttttttttttttttttttgagacggagtcttgctctgtcgccctggctggagtgcagtggcgcagtctgcaacctctgcctcccgggttcaagccattctcttgcctcagcctcccaagtagctgggattacaggtgcctgccaccacacctagctaatttttatatttttagtagagacggggtttcatcatgttggtcaggctggtctcaaactcctgacctcaggtgatctgcccacctcagcctcccaaagtgctgggattacaggtatgtgtcactgtgtctggccccagtttgcatatttctgtcttttattggtgtatttagaccatttaaagtttacaataattatgttagtgctatgtctgctattttatgattagttttttgtgtttcctgttgcttctttcttggtttgtttgggtttttttttttttgtctttaacattttttagaattccatttgatatatttgtagtgttttttaaatatatttctttgtatttttgtattaattttttagtggttgctttaagtagtataatgtacatatgtaacataattacagttaatggtatgaaaaatttagcactttgatgtatagaaaccttacttggtcccttcaccttgcctgttaatataattgtctaaagtaattcctcttcaaaattgagcaccatgttggaaaatgtaatttttgcttccactgtcaaatatattttacaaaagtcacaggaagtattgcttgttgatctctttacccattccactattctttcttgaaattctaagccaccttctattaacattttctttctgtttggcgaacttgtgtaaccttttttctagggtcagtctgctggtgtctctaaaagtgtctttatgttcccttcattcctgagggatatttttgtgggataataggatttagggtctgcagttcttttagtacttgagaaacatgtttgttccttctgtccgctatggtttcagatgagaaatctgttgccatttgaaccattgttccctagttcataatgtgccatttttatcaacctgcgttcaaagtgttttgttttttttgtagtgttcagaagtttggttatgaggtgtgtgacatggaatttttttgagtgtatcatgtttggtttttgtttagctttttgatttgtcggtttatgccctttgccaaatttgggaatttttaaccattatttcttgaaatattttttcatccctactctttctcctctctgtgatatgaatggtagagcttttgttactgtctcagaggtctcttgtgctttcatgtttaccccctttttctggtctatttttccctttttttcatattggttaatttctgttgactttttttcagctcactgattctttttttctgccatatgcagtctactgttgagcttgtccaatgagttttcgttttggtttttgtatttttcagttgtttaatttccatttgttttgttttgttttgttttgtttttttgagacagactctttgctctgttgcccaggctggagtgcagtggcgcgatctctgctcactgcaagctctgcctcccgggttcatgccattctcctgcctcagcctcccgagtagctgggactacaggtgcccgccaccatgcccggctaattttttgtatttttagtagagacggggtttcactgtgttagccaggatggtctcgatttcctgatctggtgatccacctgcctcggcctcccgaagtgctgggattacaggtgtgagccactgtgcctggcctccatttggttcttttgtacatctttgatttctttgcttagtttataatactaaagggctcagaaaacagaaaaaactaaattccagagtcatggttttctggtggtttgtctcaatatttgaatagaaatcctaaattatctggaggagtagaagtcctgtaatcttttatattgggcttcttaaatatttctgtcaacagatcttatatcagggtgatctgcatatcattcagagttacgtactccacgggaaggttgtatgtaaaatcctccagctctgtaagccttgttatatcctcaatggagaaggggtcattccttttctaagatcactcttacacttttttattagacacacacacacccttccccaaccaaacttgtctaagtcctctgtctttcatactcttgtttagtctttaacttctccttattaaccagcttctttcccataatgtatagctttagtcggatctcaagcctcgtttccaacctatttcacccttccttgcctatcaagctctggttattctttcttccacacacatgccctgagtaactattctgtgcactgtcgccacccctttacatttccttttactccccagatactactaaatggcttccaccaccgttgcctgacttaagcacgtctcagaaaggtcccttttgaccccctcactctctttttggacctccatactgctaaatctctgacttgaaggtcctttcctggcttctgtgaattcctggcttttttcctttttagggtctgtgtctttcttccatctgtaaaacagctttacttcccagcatccatcatgatcattgctgttttctaacttgtccttcaccccatgactgagttaatttgcgctgaagacactttactctcaattatctacagtgtttccctaaatctgtgtctccaggttggatgtttctcatgtcgttaaccactggtcatccttccacaccttttctgtatttgcactcactgagcctatatgcatgtatcatgtggccatgaccttggccgtggggatgcacccataatcatcataagagaacacaaattattactgtgtatcagacattgtttcgaatgttttacatgcgtcagctcttttaacctttatgacaactccataatgttatttcccccctttaactgattagaaaactgaggtacagaaagattaaggaatttgtcaaagatttcacaattatgaaatttgggtttggggactggaagccactgcactggcttcagaatccatgtccttaaccactttattgcttctcataaggtgggtctttgtttcctggtcatcacttgtttttactaaaatgggtcaaactgtgctcatttatttataatctactattcttatttgacagtacatcttggccattccttcaagcaaatgagataaaccagactcactctttaatgcctgcataagctattgtgactgtagaaaagacggagaatgtctgggtttgaggatatgtgggaggggtggggagaaggagtagagaagggctaaggcatgcatgttgttttaggtgtgtttgagatgcctgaagaacatcagtgtatccccctaatttctgtcatgttactcaaaccagacacattgtggccatttctttttcctttatcattcccacgtccggccactgccccattcctttttgttccgtagtagaccctcaatatatatgtgtgtgttggtaaatggccatacacagcagggtattttttattattattttcagttccctcagcgcgtttaccacaaagctgtgcatataggtggcaccatatatggcgtaccttgacctcgaagagaatctacatggacttttatggacctacgtacacaattttagaaatcataataaatgaatgctggagtcctcaagaccccttccagatttgatttgctaggaagactcacaggactcagcattttgtcatactcaatggctatgatttaccacaccgaaagaatccagagcaaactcagcaaaaggctcaaacccaagtccagaggaaaccaggcacaatctttgagaatcttaatgaaatcacacaggatgtgcttcattgaagctccatctgggacttaaaacaacacacgtgagatgtgttccaggaagtcgtcttgagcacccattgctcagagtttatattggacttgctttctagcacataccacaattgtagacctccagaagaacaggaggtgttcagcgtaagacaatttaggcacacggagctacttctcattactgggaacaatgggaaacttcccaaaacctaaagtacagactccagccaaggatgaaccttgcaagatcaaagaatagcagtctctggcctgctctgttctctttttcacagtaacttaaatggaaaaatgctgagttagcttaagtttctgtaacaaacattaagcaaataaaattttctataacagaaataagccatagctttgagatgaaggcttatatacgtgtaaaccattgtaaccaagaaaaaaaaaaaaagtcagagtcacagtgaaaatacttaacaaactagccaggatttaattcagtgatgacagggaacagaggaagtcttgtgagaaaggatcttgcctctgcctagtatctttcacagataggcttcaagtggtttgatttgcagatacaccctttcttggcctttatttcggcaaagatgtgatgggtaggtaaatgccgtgttctttccctagcacgtatgtcagtttctcatccactctttgttcttgctattgaaagttgtagcttctggctacaacagagatagttgaagaatatggagttcgccataatttatcattaaatgtggataatttgagattaaagaatatgttgttgcaggcttagtcactttgatggatctgtctgtgagtttcacttggaggaagtgggagcagttggcttcagctgagagggcccttacagagacatgatgctagagaccttgagaaatctggtctcttgtatatgtaactcctctttgtactcagactccggcccacagatagcctttcctttccactgtggaaagttggggaggctccacaatgctcagtgatgtatttcaattttgagaattgaatatttttaatgattgctaagagatggattatttttgctcatagcaaaatctgtttgtgtttcatatctcacaattggaaggtctcagctaaattgtaaatggacagtttcttttgcctctttcggagtagtgtcaagagtgtggacctgggagacagactacctgcttatactttctgtccttgttcctacctgctggaaaggacattcatagccactctgcctcacttaaattggagatccatgtattcacatgtttttattatgctggctttgagagagaagatctcactgtcacccaggctggagggcagtggtgcgatcataactcactgcagcctcaaactcctgggctcaagtaatcttcccatctcagactcccaaagtgctgggattacaagcatgagccactgtactggctattctgctgtttggcaagtggagccttgctgatcctgagagactgcccatcccaggactagctaattttaagtggtagcaaaggactcccctgggtatgtgcctttgatatgcaaccaaacaattcagtgcccattcccttcccccaccccctttatcaaggcctcacacatggagccactatcttcctgccataaccactccagggtcagatattaagcaagtagggacagttcctaatgaaattcaggcctgtaatctcagcactttgggaagctgaagtgggaggatcacttgagtccaggagtttgagaccagcttgggcaacatagtgagaccccatctctacaaaaagatataataattagctaggcatggtggtgtatgcctgtactcccagctacttgggaggctgaggtgggagtattaaatgagcccaggaggttgaggctgcagtgagctatgatggtaccactgtactccagcctaggtgacaagagtgagagcctgtctcaaaataaaataaaattaaaaagccaagcctaaccctgcttagcttgcttaccttgtcttgaccattcttacctgcaaaagcacagtgaaggttcttgcccatgctttcccccagctcctgctgtttttccgatcctgctgcttccgcatgtggtcctacactgcctggtgtgtgcccctttcttgggaagtgtgtgtagctaagcatctcttcaatggcagtatctcctgatctgttggcctcaccatacctgaataataaaattggcctctcaaaatgccacctcaaaccattacatggaagttacatttccgtgtaatttctagagtactgggtacctacatcaggcaacatggtatagaaccatggattggaggatggattgatgccaaggagggactgtttaggtgaattactaggaaccagacatccaagggaccactgtgttggtgggatcccagtgatgtcagtagtcaagactttagaaaaatagttccagatgcctttctcattgttggacacttctgaaaaaggccaagcacaactaattgagggccccagatatacaaacattattctgtcatttctccaagctgtttgaagtttgaagtttgtctttctgtatattatttcccagtcctacctacatcatttgttcttttttttttttttttcttttttctttttttgagatggagttttgctcttgttgcccaggctggagtgcaatggcgcaatctcggctcaccgcaacctctgcctcccaggttcaagcaattctgtctcagcctcccgagtagctgagatcacaggcatgcaccaccatgcctggctaattttgtatttttaggagagatggggtttctccatatcgaggctggtctcaaactcctgacctcaagtgatctgcccacctcagcctcccaaagtgctgggattacaggcgtgagccaccgcgcccggcccatttgtttgcttgatattctcaggcatctgcattaactctcttttcttatgatctacggcattgcagttgtatagcctctcaacatacctgtttgcccttcccagtgccattccatgtccctgctcttgggtaaaatgacacgtgtttgaagtggtcccttctcactctgtctcttgttgatccctggaatcacacataagcagtggtcactttctttgcaatcttgagtttcctcctgacatttgccttcgatgtcatcatggccacctacaagcctgtttttcatctgcatgttcttttgtcacttacactttctaagttatctttgcataactgacttctgcttgagtgtcagtcaccaccagtctggtctttcctgtgtgtgtatgggtttctccaacttgattatttgtcctttcctccctctcctcctttaatagaggagcctcttagggatgttttccttttttgtgtaatattttcacttctccattacctctttcttgatttctctccacttcccaaacctctactctttgtggaactccttgctacaatgccaccttctccgacattgtgactaaggtcagaagtgacttggtgcttataaatcacaagtccttgtcattcttgggccatcagtagaattttattgtgtctaatactcaattcgtgaaatatgttctctttccttggctctgtaacatctttttcctcattcgttccctccctctctcccttctttgtgcagtcatccatatctagctgcccactcaatgttgaaatacctaaaggttttgtccaaggctcttttgccttgtatggcctctccccagcctcatctgtgcccttggcttcagttacctcccttactttaaaggcattgaaaatagaataccccagtcttgagcaatccttacagctctggacctgaattaccagttatcttcttgctatcttcacatagatgtttcaaagatacctcattcttcacctgatgtaaataagatcaataaaatgcttctccctgactctgatctacttcagtcttccctctttactacatggcactgtttagttacgttggctagaaatttccaactcagcatagttacctcaatctcttcctccttcatgtacaatcagaaagttgtgtttttttgtttgttttttttttaacacagaatctcgttctgtccccaggctggagcagtggtgcgaactcggctcactgcaacctccgcctcctgggttcaagcaattctcctgcctcagcctcctgagtagctgggattataggtgcatgccaccacacccagctaatttttgtatttttagtagagacggggtttcaccacgttggccagaatggtctcaatctcctgaccttgtgatctgcctgccttggcctcccaaagtgctgggattacaggtgtgagccactgccccggccccatcatttttaattcttaaatatctctcaagtatgtccacttctctctaccacctcttcctagtccatccactcaccatctatcatctcaattagtgtccttttacccacattttctcttcaatccattctctaagctgaaaccagagaaccatctcagatttaatagtgctctgcttcgccctccctctgcccccactacgtttcctgaaaactttttatggcttcaactcttgggataaaaaccaaatatggccaggtgtggtagttcacaactgtaatctcagcactttgggaggccaaggtaggaggattgcttgagcccaggtatttgagaccagcctgggcaacaaagtgagacctcatctctaaaaacaactcccaaatcattacacggtcaatcctttgggctttatctgagctttatctggtctgggaggtgcctcatttactacctttcatcttgcataacttatgccctttctgttttcactttgtgtttccttttcccacctgccatggggcttttccaccacacactttgtccagtagtgaatatttatccttcatcccagctacgtcataagcattctttcataaatatctgtgtgtgtgtgtgcatacacatgcatatatatttaggtttgattactgactcctgactgtctcaccaactagatttccagcttcaaaagagcacagatgttaatatggattttatcctaattgttccatgcacatagttcctagtcagtagtagatattcagatatctgctaaatggatacgtggatgaatggccttaatcatcttgatattttaggttacttacctcaggcttcatgatttgctagaagtacacacaagactcagaaaagctgttatggttatagtttattacaataaaaggatatagaccaggatcaccaaagggaaaaatcacatagaatgaagtccacatgaaagcaggcacaaaactctgggtgttatctcccattacggtcacatagggacacacttaattcccccagcaaagatgtgtgacaagatgttcacagtattataatacaagccagggaagttcactcaagcattcatttctggggtttttatggagggtcatttacataggaatgcagggtccacataactagtcatagccatacagcccttgcaaaaagcaaacatacagtgtggcccagggcctcgggcatgcaaaatccagcattcaccatgaggaatattgtcagaagcatttgaaccacagcaaatccgtcttgaataggggctgggcaaaatgaggctgagacctgtgctgcattcccaggaagttaggcattctaagtcacaggaggagacaggagtttggtgcaagacactgctcacaaaaaccctgctgataaaacagcttgtggtaaagaagctggccaaaaccaagacggccaaaacccaccaaaaccaagacggccaaaaccaagacggccaaaacccaccaaaaccaagacggccaaaaccaagacggccaaaacccaccaaaaccaagacggccaaaaccaagacggccaaaacccaccaaaaccaagacggccaaaaccaaggtcatcctcactgcccattatatcccaattatgcattagcatgcaaaaagtcactctcagcagcaccatgacagtttacaaatgccatggcaatgtcaggaagttaccctatatggtctaaaaaggagaggaaccctcagttctgagaactgctcacccctttcctgggaaactcgtgaataatccaaccctcctttagcatataatcaataaataactataagtagccttagtccagcagcccaaactactgctctgcctatggagtagccattttgtattccttttttttttttttttttttgagacggagtcttgctctgttgcccaggctggagtgtaatggcatgatcttggctcactgcaacctctgcttcccgggttcaagcgattctcctgcctcagcctctcgagtggctgggattacaggcatgtgccaccacgcccggctaatttttgtgtttttagtagagatggggttttgccatgatggcctggctggtctcaaactcctgacctcaggtgatccaccctcctcggcctcccaaagtgctaggattacaggcgtgagccaccgcgcctggcccctttactttcttaataaacttgctttcattatggactcaccccgaattcttttttgtggaagatccaagaaccctcttgaggtctggattgggaccccttttcagtaacaatgttcttagaataaattatctcatcaaatcgatacatgaaggcctatggactcaggcttaaaaattacttttaccaggcaaaatattccagaaactcagagattgtcttcctggagctgatcaagggccatttctttctttagaatgtatagcatctgagcaactgaagcctgatgagttcacactttcgtgtataaccaaagccctggccctagcctagaatctcttacagcaaaacaatcatatttactgagcatctacatttagtataacatttatataagatatatcagcagtatcatcatgaacatgctgagccactggagcagctcgtgtggggaatggatagatttagaaacaacaatccatcccataaagccattcatacttttccatatatttgtatcaattcaattactcattgttctccttgatctactgttaattgtactttgtggtaaaccacctcccctctcactacattggcttaagttatcctccaccttgcacatctggaaagagccagagctccctaacaggacttctccctcttgcccctcccatattccaatttccatagactacccagagtgatccttttaaaacataaatcagtccaggcacagtggctcacgcctgtaatcccagcactttgggaggctgaggcgggtggatcacgaggtcaggagatcgagaccatcctggctaacacggtgaaaccctgtctctactaaaaatacaaaaaattacccgggcatggtggcacatgcctctaatcccagctactccagaggctgaggtgggagaatcgcttgaactcaggaggagaaggttgcagtgagccgagatcacgccatcacactccagcctggcgacagggcaagactccgtctcaaaaaacaaacaaaaacataaatcagataacatcacagctctgctcaaaaccccatgatggctacccatttcacagtgtattagctatattttcttattttctgcattgttgatgctatggaatttgggaccttgccatttagagttaactgattcttagagattgcaaatgactcactctgaaccatgccttttatttgcatactaacaaatccagagtaccctaatgtgaatcatctcctctgtctggctcttacactacaggagacaattttttttttttttttttttttttgctctaatgactccagggccaggtactaggcagacagggacagctcctagaccccaaagtctaccaactttattcaaaccagcaaatcctcttctggttacccagccctgcctttcttttcctgtggaaaacaataaaggatctggcctctgctttctcctctgcttctgcttcttataccaccctggtgcttctcacatagccctgcaggatgtgttttgcctactgtttctaaaactccgtgagttgaaagttcttccttcctggcaatcatttgcatgtccgagtttcttatcagaccatactgcaaaaaaccccaggtacatttttgaacacacaggaacatattacaacctctctacgctggcataaaagactacacaatttgtttccatctatctctccaacttccatgcacattcagttccagccgcactaggcttcttggtgttccacaaacacccaggatgctctgtcagttccattgtcctgtgtgttttctctgagtgataacactgtttcctgagatctccacttgatgagtctttaattcctccaagtccatgctaaaacatcactttttttttttcttttgagacgaagtcttgctctgtcgcccaggctggagagcagtggcgtgatctcggctcactgcaacctctgcctcccgggttcaaatgattctcctgcctcagcctccctagtagctgggactacaggggcccaccaccacggccagctaattttttgtatttttagtagagacggggtttcaccatgttagccaggatggtctcgatctcccgacctcatgatctgcctgcctcagcctcccaaagtgctgggattacaggcatgagccaccacgcccggcctaactgtcctattagacctgtcccaaccactctgtattgcacaactggctttatcccactctcactgattcttaatctgctctagtttgtcttatctccgcaacactcctaaccttctatattgtttaggagttttggattattattattttgtgtgtgtgtgtgtgtgtgtgtgtgtgtggtatgtatgtgtctccattgtgactttttgtttttttgtttagaaacagggtttcgctagatagcccaggctggtctcaaactcctggtctcaagcgatcctcctgtttcagtgtcctgagtagctaggactacaggaacaaacccaccaggcccagctctgtatctccactgtttagagcagagcctatcacaagatagtcaagtacttgttgagttaattaattaaaagttagtaaatatataaaaatatattttcaaatggttatgaatgtcctaaagaaaaatagagcagagtaatattggggtgagggactactttaaaatttttattattgttattattttttaaacaaacaggttctctcactctgttgcccgggctggaatgcagtggcacaatcatggctcactgcagcctaaaccgccgtggctcaagtgatcctcctccctcagcctcccgagtagccaggactataggtacccaccaccacgcctggctaatttttaaatttttcacagagacggggtctcactatgttgcccaggctggtcttgaactcctgggctcaagtgttcctcctacctcggcttctccaagtgttgggattacaggaccccacacctggccggaggagctactttagattaagagatccgcacttgagcccaggagttttgagaggagctgggcaacacagtgagaccccatctctacaaaaaataaaaaaaaaattagttgggtgtgttggtgtgggcttgtgatcccagttactcaggaggctgaggtgagaggatcacatgagcctgggaggtggaggctgcagtgagctatgaccctgctacagtactgcagcctgggttacagaggaagaccccatctcaaaagaaaaaaaaaagagtaagagatctggagaggcctctatgagaagggaatggttgatacaagctgagactcattacctggaccacatgtctacaatccaggtggcactggctcaacactgtatcttttacatcatcttgcaaagtgccttccctcagcttctctaagaagtatttgtagagtgaatgttgagtggattttataataatgctgtgaaatccccatggtctcctggcaccactgtaggactgttactgtaggactgcggggtcacccctggctgttaaggccatttccctttctcttctctcagcaaccagcctatggcttcaggggaaacttccagttcaagactgaaagtcatggttttggccctgagatgtatttctgctcctgactccatgagaacaagacagattctacagggaatgaaaggagaagctacaaggaatgaaaggagaaggaatgaaaggaatgaagggagaaggaatgaaaggagaagctgactggagcaaacactagttatgaaaggattccctatgaagtgagacttgagatgaagaggaagcagcagattccagatgaattttagggttggaacccatatattaccttcataaccagagagcctggtattcttgattcttccactatagaccactgatgtggtttgagaagagagtacagaatgacaccactttcaacaatacccagaggcataaattgctccaaagctttttatcaggcttgaccgaacacggtggctcacacctgtagtcccagcactttgggaggccaaggcgggtggatcacatgaggtcaggagttcgagaccagcctggccaacatggtgaaaccctgtctctactaaaaactacaaaaatgtaatcccagctacttgggatgaggcaggagaatagcttgaacctaggaggcagaggttgcagtgagccgagatcacgccattgcactccagcctgggtgacagagcaaaactccgtctcaaaaaaaaaaaaaaaaaaaatcaggctgtttgggttcccaaactgtttgatatttgttctacctcaggttggcgtacctccacatgtttctttccaggctctctgcttgtcccctcaggcagtatctctggatctgggttctaaagctgggagtgggaacaatggcccacttctgacatcctgctttgagggttgagtgctcagtggtagcgggtggccagtggtctcatgtcttttcagctgccctgtcatggtacactactacagactttcagtggggcaagtgtgatgaatccccagtgctcagcatcatgatgcccaaggaagggccttcatctcaccaacactggatgggtggaggaagggagctcctgcctctggggctgcactcactagggatttagcctcagcaagtttctggtggcaagataagaaatgctgacatcctaccctgctgggaagacagccctctgtatggaagctgagagggagagccctgtgttcttgtctgcaacactgtagagtacagtttccatatcattgaactgggagggctgaaggaaagagatagtcttggttcaaataccacagactctcgcagttcttacagaaggacagattctcttgaataaatattttttcatttgatgtatatccttaggactatctccagagacacgactttttttgttttcatttttgtttttaataattttcaacagttttgttggggaataggcccacagagctccttatgctgtcacgccagaagtctctccttgctttttttgttttaaactttttattttctgacaattttagctgtaaagaagcaaagatattacagagttcctatataacttcatgcagctccacctcatgttaatacttcataagcctatgacatatttgtcaaagctaagaaattaacatggtatactactactactactaactgaactacacactgtatttggatttcaccagtttttttccactaatgtcctccagttgcaggatccagtccaggacaccacatttcagttaatcatctcatcgctttagttttctcccatctgtgacagctgctctgtcttttcttgtttttcatgatctacatacttctggagtactcataatgcaatgtcccttaatttgcatttgtctggtattttttcattattagtctagaattgtgggttaaggggaagaacatcagattggcaaagtgtcctccttgtatcatcatagtaggtgttacgtgatgtcaagatgactaaaatggaccaggcacggtggcttacgccctgtaatcccaggactttgggaggccgaggcgggtggatcacaaggtcaagagatccagaccatcctggccaacatggtgaaaccccgtctctactaaaaatacaaaaattagccgggcgtggtggcgtgcaactgtagtcccagctgctcaagaggctcaggcaggagaatggcttgaacctgggaggcggaggttgcagtgagctgagattgcgccactgcactccagcctgggagacagagcaagactccatctcaaaaaaaaaaaaaaaaaagatgacttaagtgatgctaaccttgatcacttggttaggtacttgtctgccaggtttcccctgtcaagttactgttttcattttccacaattagtcactaaatccagccaactcaaggggaagaccacaaagctccactgtctgaagggggctgttggtatctatgtatactatttgcaattcttctttaagattggtttcttctccttgtttatttatgggtgagccttattaattactggttttaatttctgaaaaatcaagtaagtgctcaccttagcaatacatatattaaaaatcaaatgtaagtgcttctatgtgtgttttgtgaatcccgtcttatacaaataaggtaagggagatactaagatttggaaatagttcgtctccaccaaaactcatgttgaaatttgatttccaagctgggcatggtggtgtgcacctgtagtcccagctacctgggaggctgaggccgaaggatcacttgagcctaggagttcacagacagcctgggaaacatagtgagaccccatatgatatggtttggctgtgtccccacccaaatctcatcttgaattgtaactctcacaactctcatttgtcatgggagggatcggtggggggtgactgaattatggggcagggtctttcctgcgctgttatgatagtgaaggagtctcaccagatctgatagttttaaaaacaggagtttctggctgggtgcggtggctcacacctataatcccagcactttgggaggctgaggtgggcggatcacaaggtcaggagatcaagaccatcctggttaacatgatgaaaccccgtttctactaaaaatacaaaacattagtggggcgtggtggctcacgcctgtagtcccagctactcaggaggctgaggcaggagaatcacttgaacccgggaggcagagtgagccgagatcgcgccactgcactccagcctgagcaacagagtgagactccatcaaaaaaaaaaaaaaaaaaaaaggaaacattcagtaagcttgttctgtattcctacacaaagagtataacagcaatatattccacaagagtaaagcaaaataagtaaagttattctaagtaaactaaattagaaggcttttcatgaactgagcaactgttggaactaagctggcatggggttgttagctgattataatgtgcccagaattggaatattgatccagatttttacattacccatccctcttattttttctgagcagcagtcagagatgttggttcacaggaataagcagggtagcttaaattgcagaaacaaacttaaaaagaactaatgagactagaatttaataacaagtataccatagttcttgaaatataatatttctctctccagtttcccatttttactaaagacaaattagggtaagactgatttgatttgctttattatacttggcctgattatttatataaagtgcagcaagaataattattttccacataggcatttttttttttttttttttgagatggagtctcgctctgttgcccaggctggagtgcagtggcgcgttctcagctcactgcaagctccgtctcccgggttcacgccattctcctgcctcagcctcccgagtagctggggctataggcacccgccaccacgcccagctaatttttttgtatttttagtagagacggggtttcaccatgttggccaggctggtctcgaattcctgacctcaggtgatctgccctccttggccttccagagtgttgggattacaggcgtgagccaccacacctggcctatccacttttaattaagctaacttttaaccatagtgctctttaaaaaagaaatcctttcaaatctcttattacccaactttagccatgccaagaagccaatatttctaacttctgaactttaccaaaggttatctcctacgtgcatagagaaaggaaaatttaagacagtctgcggaggagaagagactagacaaggtcacgcagatattaaaccagaaatgacttacttcctaggtggggtatcaaacccaaactgccactgtgaaagtgcagaaaccttagttactgagctacagtgtgggacggtgcctacttcctttcacagaagcctagagtagttaattttgagcttgcaaaggcttttaactattttatatgatttttagagctgactatgacatgaaccctaaaattccttttccctagtaggtggagaccaagagaaggtactgccacatggttaaaaggtcaggctcccaaggacataaaacaaggggagacttcatcctgtttgtttgtttcagggacctgcagctgtttgttactgaccagtttgctgggtcatgttgaaaagtgggctcacaggtgttctaagcccatgtttcatcctacagaaaaacaaattcacagcacaaaatacaccagtttgactagcttagaattctttttcatattaatcaaaactttacagaggagatacacactgatttattatttttattattgttattatttttaccattcattcaaccgtttgcacagagagggagaagtcagaaatctgactggtaacaaattcttacctttttgctggcatgccaggcttctgtgttccctttctctgagtggtcccagtgatctggcttgtggcaccatcgccctgggggccaagcctcattgtaaaggaaaactactttttttcattctgaccagagcaaaacacatgtgatgaaacatacacattagccactctgcttagcacccaatattaaactggcaaggcttaaatttgcccccagataggccctgtcatctttaatccaacctctgacttggagtttcaacatgtggtctctgggcaagatggtcgccctgagtaatagagtaatagaaaagataagaaaggggccgggcgcagtggctcacgcctgtaatcccagcacttcaggaggccgaggcgggcagatcacaaggtcaggagatcgagaccatcctggctaagatggtgaaaccccgtctctactaaaaatacaaaaaattagccgggcatggttgcaagcgcctgtagtcccagctactcgggaggctgaggcaggagaatggcctgaacccgggaggtggagcttgcagtgagcagagatagcgccactgcactccagcctgggcgacagagcgagactccgtctcaaaaaaaaaaaaaaaattatatatggaaatgctttcgcaggcaatactttcccaggaaatattttccacaagcaatactttcccagggaaggcaaaatgatcagggaggccagagaaagacccacccattgcagtgacactgaaaagttcaggcggctacggctgctgtcgtgaagggatttttttccagcagtcccgtcagctctcaagtttccccttttgggggaggaaaaagctccccatgtcccacgatcctgtacacgcctaaccctgtcgcccggagccatcagcaaagagtgcaaggcagattaatccaaagacaatagcagttaacatcccacggtgccaaacctcttcttagccaagagggactttactgagaggggtctctaaccccctaaatcttagaagggactctaatcctcctaagttgggcctctaacccaaggtcagtcaagcgtccttgccttttattaagaggggcctctaatccactctgccttaggagagactctaactcccctaacttgagcgtctatcccaatcccattctttacctgggtaccccaccacttacccaaagtcatccaatcagtgctgcagtctatttcctttgagtcaggggggtctcctcagcattgtcccttttgtggtttgcgagaaaagtgttacccgaccccaccacttacccaaagttagcctttgggtcacgggttcctgcagtatagtctcttctgtagtggccaggaatgtgttacaggaaaggggtcccaatccatatcccaagagagggttcttggatctcgcacaagaaataattcagggcgagtccacagtgcaagtgaaagcaagtttattaagaaagtaaaggaataaagaatggctactccatagacagagcagccccaagggttgctgggtgcccatgtttatggttatttcttagtgacttgctaaacaaggggtggattgttcatgcctccccttttcagaccacatagggtaactccctgacattgccatggcatttgtaaactgtcgtggcactgatgggagtgtagcagtgaggaagaccagaggtcactcttgtcaccattttggttttggtggttttggccagctcctttactgcaacctgttttatcagcaaggtctttatgatccgtattttgtgctgacctcctatctcatcctgtgactcagaatgccttaactgtctgggaatgcagcctagtaggttttagcttcattttacccagctcctatttaagatagagttgctctggttcatatgcctctgaaaaaaccatttaaatttaattataagagtctggccagagggggtggctcacgtctgtaatcctagcactttgggaggccgaggtgggtggatcacctgaggtcgggagtttgagaccagcctgaacaacatggaagaaccctgtctctactaaaaatataaaattagccaggcgtggtggcgcacacctgtaatcccagctactcaggaggctgaggcaggagaatcgcttgaacccgggaggcggaggttgcagtgagtggagactgtgccactgctctccagcctgggcaacaagagtgaaactccatctcaaaaaaaaaaaaaaaaaaaaaaaatttaagagtcacaaatatgtgaaaaagagaatgatgtctttatcaattttcaaaaattactattgccagtgatgaataacagtgttccttgcacactaatttagccaaaaatatttctccaaaagtaccgcatcgtgtaggaaattgactccatctccattccttgactattttcaatctcaaaattaaatctcttggagagtactttctgcacacctttctatttccttaaccatatatatcgtcaaaccattgaaagctggactttattctctcactttcatagtcatgaaaagaaaaaaaaaaagttactgatggggactcctaagacttcgcataatataatctttgcatagtctaggattgttaaaattcctaacaagactttataaactctcctgtctgcaaccagttaatgctgggttgggccagggttcccctctttcccgtcacttatccatctacgctcattcttttcatagcctcacccaatatcatgacttgaagtaacagtttacagtaataactcccaaatttatatatccacgctcgaaccctctgccaatgttgaatcataggttgagtatatggcactacgctttgtggtcttactgacgtttcaaactgatcatgcttgaaatgggagtactgggcttcccggcaagcctgctccactagcagcctccccacctcagggtacgggaagtccacacgtggcgaacgcgaagcctattacatcacccggaagtccctgcatcctacgaaggctgggcccggccaaaggaggcccaatagagggcggtctgtcctttcccagcaggctgggcacactgtcaggcgtcctcctttgggtggctattttaactgctcatttatccttttcttctatgaaaagatccagaaaagaggcaaagcaagcgagaagtcgcgggcccagcccacagcagggtaagcacctttgttcggggtctgaatcggggcgaatatccccgcctcctgacctcgattttcctgagctagaagggacctttcgaccctccgacttgtgcctatactaaggcggtggccctaagacgacgcgggggttctggtgcgcacttacgtgcagtcggatgcgctgggtgagttcccacacccggtagatgtaagggaaaaactgcattacccagaaggcactgccccttgcgtcggccgcggactctgggccattgacgacccaggacaggagagttttctgcgggccagggcggcggaggcgggacttccgcttcttcgtgtgacgtcatctccgtgggccggtttggccctgaaacagtgtggggcctagagcgctgggtgggcgcgttctgcggcctgagcagggacgggtagtgaagcggttacgccccttcttcgcgtcttggcgggagcctgacgccccgcttctcccctaacgaggtgtcccaccggcgcccgccgaggcctaggcctccgcagccgccctccgtctcctcagccccgacgctgcgccttgggccttgtgcgcatttttttcgggggaaaactgaggctcggagtgcgaaagtcagccgaggtcgccccgcccaggacagagaagggctgtggtcggctgatccgcggcattcccgggatggcggcggcgtggatggctccggcgcaggtgagtggacgaggtttcggccttgctgctgctgtgctatttctagaggcctcgtgggcaggctggaagccaagacagccacaggatttttctttgtcgccatcgtttatttaagagaaatggccgtggcttgtcatttcctttatccgcagtcctgcaacagtgttggcctctgataggtgttcagtccgtggttgaaggagtgatgcttccttctagggatctcatcacacttcccctaaatccaaccttctctgttgcctgccagcccgtaccccatccacctggccaaccacccctgaccttgtctgtttgcatttttccctggtcctttgctcttcagagccaccaacctgaccgtgcagtcctcttccattttccaggctttctccttgcacttccttttacttcgaacactgcccctgtaactttgcagggcctccctttcacatccttttggcatctgtccaggtgtcacctatttggaggtgccttttttggcaattccggctaaagtggcaccttacacccttgcccagagtctggtatttttgtgtagataatctgatggtattaaagaagcttgtggatttgagtttgtcaaggatgtaatgggaacaaagaaaaataattgcaaagaatgatattaactgtcattgagtccttgctgtgggctgatcggtgagtattatttaaccctcagttcgtttaaccctgaaatttttttttttttttttttttttttttgagacggagtcttgttctgtcgcccaggctggagtgcagtggcgtgacctcggctcactgcaacctccgccttttgggttcaagcgattctcctgcctcagcctcctgagtagctgggactacaggtgtgcgccaccacgcctggctaatttttgtatttttagtagagacggggttttaccgtgttggccacgctggtcttgaactcctgacctcaggtgatccacccatctgggtctcccaaagtgctgggattactctttagaattaggttctgttgtcatcattgttttacacaagagcaatttgagggtcacatacgtccaattacctgccttacatcactgtagctcttaagtttcttaagtcagaaactaacaactggtgtgtctaacatcatagcctgtgtttttaccctcttctttacccgcagtggttagggaggcctgggggtgagacctaaagtaacctttgcaagatgaggcctccttctagccagtgatcttgggcatgaggagtcatggcctttcatactggtggaactgtgtagacttaaaaaatggtatattggttgtttaaggagttctcaggggacctgtgtggcttccacggtggttttatatgtggttccccttactcccttacctgctgacatattctgagagggcacgtttgtatggttatgttgctgaatgtaccctcctactcagccaggatagatgtaatctccagatgggcccatattgtcttggctacaacctgctgtgccctctatgactcttgttgcttgctcatggaatcttctggcctcagggatgcctgctagtaggacttaggtagaaaaggaagcgatggctcattgtgaattctccctggaagcaggtccaggccctaacacctgatcaggtgtcaccacgtcaggtgattctttggtgaggtggatgatgatgactacacttctctgcccttgtccatgggagtggctgaaatgtatatgtggatttgaaatgcttcattctcattaactgcattaactttgctaatagagaaatgtcaggttacataatcagaccagagggccctgggcttaaatcctgcctctgttgataagacctgtgactttgggctgggcttggtggctcacacctgtaaaccctgcactttgggaggctgaggtaggtggactgcttgagcccaggagttcaagaccagcctgggcaacatgggaaaaccctgtctctacaaaaagtacaaaaaattagaccggcatggcatcatgtgcctgtagtcccagctgtgcaggaggctgaggtgggaggatcactagatcacaggaggtcagggttgcagtgagccgacattgtgccactgcattccagcctgggtgacagagtgagaccatctaaaaaaaaaaaaaagagagagacatgaacacatgagactttgggtagactggtagagcggagggtaggactgaggcccaggtctcaggtccctgagtgtgacatagagatgatgatggtaaattcagatgctgtggcctttgcctcagtgtttgtttgtttttttttttttttacaaacagtttttctttctttctttgttttgatggagtctagctctgttgccaggctggagttcagtggtgcgatctcggctcactgcaaccatcgcctccgacgttcaagcgattctcctgcttcagcctcccgagtagctaggactacaggcacacactaccacacccagctaatttttgtatttttagtagagatggggtttcaccttgctagccaggatggtctcaatttcctgacctcatgatctgctcacctcagcctccgaaactgctgggattacaggcatgagtcaccgtgcccagcctacaaacagtttttctttagttcttttgactattcttttttttttttttttttttttttgagacagaggctcgctctgttctggagtacagtgacacagtcttggcttactgcaacctctgcctcccaggttcaagcgattctcctgcctcagcctccctagtagctgggattgcaggcttgtgccaccacacctggctaatttttgtatttttagtagagatggggtctcaccatgttggccaggcttgtctcgaattcctgacctcaggtaattcatgtgcctcagcctcccagagtgctgggattacaggcatgaaccaccgtgcccagccttgactattcttgatgaagtgggaaacacggttatattgacctggaaatggaggctcggcgaaatgaaatgaggtccccaaggtcacatagcaggcacacgttgatttcaggaatttggttttaaacctcaggagtctggctcctgagctggggagtttcagtcactttaccatggcatgtaaacctgtcagcatgaggcaggcacacagggaggattggtaagactcagatactgttcctgttattgttgctggtggtgatgtttttattattattatttcccattcctctaatatgtcagagcacttactgtctgtgcctctcagtccacttgggattgtcctaaccttatttctgtgttaagttcaagtggcttcctgcctaggaggctttatttatttatttatttatttattttttatttatttatttatttttttttgagacagagtcttgctctgttgccaggctggagtgcagtggcacgatctcagctcactgcaatctccgcctcccaggttcaagcagttctcctgcctcagccgcttctgtctcctcttcactgctgtaatccatgcaaggcagtgtccacattccccttgatcctagcacagatcttggccctttggaggtgcttggtgatttggcctttgattctctgtgcatcttttgcagtgctggagtgacaggttctaatcctattccacagttgcaaaggaaacattactggttctttttgacttttcaggagtctgtgaccttcgaggatgtggctgtgacatttacccaggaggagtgggggcagttggacgtgacccagagggccttgtacgtggaggtgatgctggagacctgtgggcttctggtcgcactgggtaaggcctgtcctctcctctccaaaatcaggggcaccagaaagcagcttcattctagccttcatcctggctccaggcctggctagtggaataggtcttgggagccagccctcctgtttcccaaagctttactctatttttttttttttttttttggagacagagtttcgctcttgttgcccaggctggagtgaaatggcgtgaccttggctcaccacaacctccgtctccccgattcaagtgattctcctgcctcagcctccagagtagctgggattacaggcatgtgctcccatgcccagctaattttgtatttttagtagagaaggggtttctccatgttggtcaggctgttctcaaactcccgacctcaagtgatccacccacctcagcctctcaaagtgctgggattacaggcatgagctaccacgcccagcctcatttttttgactcaccttattcttcctgatctctttgtgtcttacttagaaagggttggctacgaaatatagtttgcttttggtcacagccaaaggagagggatgtgttaccaggaaatgggatgttttgtagaacccaaaggcaggatttgcagccaggcccccctgtggcactaatactggttgtctggtgctggcttccctttatgggtctgctcctgtcactgtctttttataatggctttttctggctcagctattgtgtggaacgaagtgaccgtctagtcttgttctctgaggctcacacattccttggcactactacttcctgcatatttttgttgtctctctgttgatactcttctcacttaattctcccagcatccccatcgtcagtgagtaaggataatagggccattgcaatgaacacctcagaaacttaattaattcagtttaagagataaaccttcattgtgagatgctgttcgttgcattttttttcttggtaaaggttctttcttttgtgatgtgttgattttgatgtttgtgcaaacgtctatatgtggccaaatcgctatttggagttccctcccagttttttatttttcagtggttcatgaaatgtcgaagcgtggagtcaccacgtctacccctcactctgctgccctgttcccttaggattgagttcttccactcatgtctcccattctttatggcctccttgttttgagactcctggcaccacacgggggtgttcttcatttcctctgagcacagcacttgggagaccaaggtctgatgcctcagagtccaattccagctctactttttgtcagctgtgtgttcctgggcaaagtactgaactcctctgtgccttaattttctttttagaattttttatttctttatacccatgccagtgcagaaaagtgcctcaattttctcatgggtaaaatgggacaatatgtgccaaaaaaggcatacgtttgtttcattgtactttgctttactgcaccttgcagttactgtatttttagaagttgaatgtttgtggcaaccctgaattgagcaagtctgtcccgcaccatttttccaacagcatgtgctcactttttgtctgtgtcacgttttggtaattcttgcagtatttcaaatatttttattaatattatatctactgtggtggtctgcgatcagtggtgtttgatgttactattgtaattgctatggggcaccatgaactgcaccatgtaagacagctttatcaataaatgttatgtgtgttctgactgctccacttactggccattccctctctgtctctctccttgggcttccatattctctgagatacaacaataatgcagtcaagtcaattaataacactaaaatggaagccagatgcctctaatcccagctactccggaggctgagatgggaggattgcttcaggccaggagttcgagactaggcttggcatcataataagactccatctttttttactttttgaataagctataactcatatgctgtgttgtgcaaaaatcctaagaagtccaggccaggagtggtggctcacacctgtaatcccagcactttgggaggctgaggcgggtggatctcctgaggtcaggagtttgagaccagcctggccaacatggcgaaaccccgtctctactaaaaatacaaaacaattagccaggcgtggcggtacacacctgtaatcccagctactcgggaggctgaggcaggcgaatcgcttgaactcaggaggcagaggttgcagtgagccgagatcgtgccactgcactccagtctgggcgaagaaggagactctgtctcaaaaaaaaaaaaaaaaaaaagtccactcactgaatttttgcttatgtataaacccaagtaactaccacctacatcaatacataggctatctccagctcctcatcagggttttatgccctcgatagcttctttgattctattagctcatatttagacttcatcagcacagattggttggctgttgttgaactgcacagtgtgctctctgacatatctgtcttcttttgatcatcatgtctgtgttattcttttgaggtgtttatatacagtcggagttggttcattctcaatatgttgtagtttctcattgtatgtgaaactgccatccatttgtccattaccctgctgatggatgttcctgttgttttcaggttttggatatgttgctgagagtattattgttcatattttctggtggatgtaaatactgatttctgaattgtgtgttaacagtaaattctgttagaatatactcgtgtgtacatatcaggtcatggagtaggttgtatattcagctttctttttttctttattattttttgtagaaatggagtctcactatgttgcccaggctcatcttgaactcctggcctgcactgatcttccctccttggcctcctaaagtgctgggattataggcatgagccacactgtgtgggtgtgttcagctttaaaagaaactgcccagcagttctgcagaatgtaccatttcactttctgaccatggacatgtgaaagtttccattgctccacatcttcataatcacttgataacatcattcccctttgggaggtctaggcgggcggatcacttgaggtcaggagttatcagcctggccatcatggtgaaaccccatttctactaaaaatttaaaaattagctaggtgtggtggcaggtgcctatcatctgagctactcaggaggctgaggtaggagaattgcttgaacctgggaggtggaggttgcagtgagccaagatcacaccactgtactccagactggacgacagagcgagaccccatctcaaaaaaacaaacaaacaaaaaaaaccatcatttcattttactgtttgagtccctgtggtaggtttctctatatcacagcacagaaaccattgtaaggtcactcctttcattcctaattttcaaatacaacagtgaccataatgataactgatgatggcccacaatttaccgatctcttatgtagtgtctagcactgtgccaagtgctttatagaaattttccccttttttaagagacagggtcttcctctgtcgcccaggctggagcgcagtggcaccatcatagctcactgtagcctcaaactcctgggctcaagcagttctcctacagagtagctggaactacaggctcatgctacaacgtccggctaatttattaatttttttgtagagatgggatattgctatattgcccaggctactcttgaactctgggcctcaagcaattcttctgccttagtctcccaaatgtaacgggattacaggcatgagccaccgtgcccagccaagaattttcctatttaaccctcatcacagcctatgaaacagaatctgagagtttctgtttttcagatgaggaagtggagactaggatcaactaaatcatttctctggcatcagctgacttggtacaggcaagatttgaactgagatgttctgactccagagctacactcttaacctcccttcaatatgaactcacgattcagcacagagttttcatattttgtgcttgagcattgggccgtcttagattctctttctctgttctcactgggctttggttctctttttactctgatcttcacttttatgttggcttcatcagttatctcatagcccatcctttttactcttacatactctccaaggctaatccacacattctttttatttattattattactttttttttttttttaagagatggatctggctatgttgcccaggctggtctcgaactcctgggctcagcttcccgagtagccaggattacaggcagtacctttcagattgtgtctttttctagtattttcaggttattgtttctcagggttgtattgaatttctggatcagtttttagagaattgataattttatattatcaatttcttcattcagttagatctttattgtcttgaaataaagttttattattttctttttcaagatccagttgtttgttagccttttcgcctacctttcaccttgacagtggattctatatgtctaccaggattctgttcaccctctgtcctaggagctctgtcctaagagtagctgtggccatcactagctgtccctcaggcagaatcttgagcatcagcttcgtctccgccccttcctgtctctgaatcctgatcaaccttaacttcttatggggctgcctcctctcactgcagtcctctggattcgctgaagactctgtgtctttgtatattctatgtcctaaggctaatatgtccttctaactttaagctcatgaagcatcctctctgggaagcctccttgacctcttcctgtccctgccccttctaggctacattaagtgccccttccctggcctcttgtagctccttgacatgttcttgagcaagcttatgatagagtgtcatcattatgatgtccacctagtctcatcttgactgtgagtggggatctctattccagaccatctgtactctgcttgagcttctccctctgggtttctctttaaaaatttcaagagttggccaggcacggtgggtcacgcctgtaatcccagcactttggaggcagaggtgggcggattacttgagcccaggagttcgagaccagcttgggcaacatggtgaaaccccatctctattttaaaaatacaaaaaatttagccaggcggggtggctcacacctgtaattctagcattttggaaggccgaggcaggcagatcacctgagttcaggggttctagaccagtctggccaacatggtgagacctcatctgtaaaaatacaaaaaaattagcccagcatggtggcgcacacctgtaatcccagccacttgggaggctgattcaggagaattgcttgaacccaggaggcagaagttgcagtgagctgagatcatgccactgcactccagcctaggcaacagagtgaaattccatctaaaaaaaaataaacaaaaaaaagccaagcgtggtagcatatgcctgtagtccagctaccttggaagctgaggtgggcagatcccgggtgatccgcctcagcctcccaaaccaaagtgctgggattacaggcatgagccaccatgcctggcctttttttgagatgggtttccctctgtcacctaggctggagtgcggtggctcagtcttgactcactgcagcctccacctcccaggttcaagcgattctcctgtctcagcctccccagtcgctgggattatagccgcccgccaccatgcctggctaatttttgtatttttagtagatatggggtttcaccatgttggccaggctggtctcaaactcctgacctcaagtgatccgcctgccttggcctcccaaagtgctgggattacagggatgagccactgtacccagcccatcaaatcatagctattttcaaatcatcactattttcatcttattgttctcaccaaaaaggtggtttcatttcttctgtactatcttaataagttcttttgtgtattgtgttcccttcaggtgacagcacaaaacctgagaccgtagagcctatcccttctcatctggccttgcctgaggaagtctcactccaggaacagctggcacagggagtcccaagatactcctatttggggcaggccatggatcaagatgggccatctgaaatgcaggaatactttttgagaccagggacagacccacagagtgagaaactccatgggaaaatgagccttgaacacgaaggtttggcgacagctgatggtatttgttcaatgatgatacagaaccaagtctcaccagaagatgctctctatggatttgactcatatggaccagttacagattccttgattcatgaaggggaaaattcctataaattcgaggaaatgtttaatgagaattgcttccttgttcagcatgagcagattctccctcgtgtgaagccctatgattgcccagaatgtgggaaagccttcggcaagagcaaacacctccttcagcatcacatcatccatactggggagaagccctataaatgcctggagtgtgggaaagacttcaaccgcaggtcacacctcacacggcaccagcggactcacaatggagataagccctttgtgtgcagtgaatgtggaaggaccttcaatcgcgggtcgcaccttacacggcaccagcgggttcacagtggagagaagccttttgtgtgcaatgaatgtggaaaggcctttacctaccgctccaattttgtcttgcataacaagagccacaatgagaagaaacccttcgcatgcagcgaatgtggaaaaggcttttatgagagtacagccctcattcaacacttcattatccatactggggagaggccctttaagtgccttgagtgtgggaaggccttcaactgcaggtcacacctcaagcagcatgagcggattcacactggtgagaagccctttgtgtgcagtcaatgtggaaaggccttcactcactattccacctatgtcctgcatgaaagagcccacactggagaaaagccttttgagtgcaaagaatgtgggaaagcctttagcattcgaaaagacctcattcgacacttcaacatccacactggagagaagccctatgagtgtttacagtgtggaaaggcttttacccgcatgtcagggctcacaaggcaccagtggattcatactggagagaagccgtatgtatgcatccaatgtgggaaagccttttgtcggaccacaaacctgattcgacactttagcatccacactggagagaagccctatgaatgcgtggagtgcgggaaggccttcaaccgcaggtcacccctcacaaggcaccagcggattcacactgcagagaagtcccacgaacccatccagagtgggaacgtttcttgtgagagcacagatctcattcaacactccatcatccacactgagagtagcccagtgagtgcagtgaatatggaaacgccttcaattgccgctcattcctcctcactcgacatcaacggattcatagtggaagaaaccctaccattgtaacagatgtggaaagactttttacgtacacttcagtcaacatccaagaattcctattagcgaaatagttttttaatataaccactgaagaaaatctgtggtgagaggaaacatcttaccatctggtcattcatactgaagagaaactccataagtatcatctctgtgggaaaacctgttttagatcatcatttgtcatctaaacaattatgttagaaattgacacagccaagagtcttattctacatctgataattcacccatgaaagagacccagtggttactgtgcacttaggaaaaccttcagccacatctttcttattagtttacagtgaaatgttatctcagggacattcaaacaaaggaggaggagtcatagggaagagaaagaaatggaagcacagcttctttcagacttccctgacaagcccatggcaatttgtcatcccctccttattttatttgggagagggaaatgtttcagaaacaaaagggcctcatcccctttattttccctgtgtatacattcactgctgtccagtgctgtagacaaacggtttgtttgaaaacattttgtgaaagcctgctttgttccacagcattgtctccactcttgaggagcagaagcatatatctttatgagaaagatggaggcttgagttatgaaatacttttacatttaaggagataaaggatgtacatatgaatgggcacattttactgcacacttcagacgctttgacttttttaaaaaaattgtttctccgtgtgtctttaaccacccagtaccatacttttttcttgatctggatctacttgtcaatttcttctttatttttctgtaggatggagatgatattgtagctgtttgtacataatgtaatccagggagtcctaattcttccctctgattgtggtttctcagcttttttactgctctttagagagagtaaatagttcaaaattcacctcaacaattttctagaggtcaatttggaaccaaaaatgaaataagacatgtagctaaagtaagttaaaagattatgataaactcagaaaataaacacagagaaggaatctcatttttcagtcttacagaagattgtgtgaaggctgactatacataaagtgactggaattttaacaggtgaacctgcatatgtatatgcaggtagttgtcaccatggattgagtccagtcgtagtaattaatatgtttaatcagaatattttggaatttctcttttggtattctttttgtttcttttattgtttttaattgacaatgtttatggggtttggtgtgatatttcaatacatgtgtgctaagagtaatgatcaaatcagggtaattagcatatccatctcaatcatttatcatttctttgtgtttagaaacattcacagtctgcttttctagctatttgaaaatataaaatgtattattgccaattgtactcattctgcagtgccacagaacactacaacttattcaaatggaatcttacttgctgtaattttgtatttgttaaccaatctctatctgcctctctgctgtccttcccagcctctggttaccaccattctcaaccttttatgcttgcatatgagtagaaacatggagtatttctctttctgtgtctagcttatttcacttaatgtctttcaagctcattcatgttgctgtgaatgacaggtttatttttcatggctgagtagtattccattgtgtatatatgccatgttttctttcttcattcatctgataatggacacttagactgatttcttagctattatgaatagtgcttcaataaacataggagtgtagatctctctttgacgtatagatatatttgtttttgcatatatgcccagtagtggtatagatcattaccagtggatcatatggtagttgtatttttaacttttgtttatttttcattttttaaaatggggtcttgctgtgttattcaggctggtctcagactcctgggctcaagcagtcctgcacctcagcctcctgagtagctgggactacaggcacacaccaccgtgcctggctatagttttagatttttgaggaacattcatactgttttccatatggctatactaattagcattcctaccagccatatataagagttcccccttttccatgttctcagcagcattttttattttttatctttggtaatagccatcctaactgaggtgaaattatatctcattgtggttttgatttgcatttccctgattagtgatgttgagcattttttcatatacttggccatttgtatgtctccttttgagggatgtctattcaccttatttacccattttaaaatcagattttttatttttattttttttgctattgagttccttttatattctggatattaatccctttcagatgaatagtttgcaaatattttatcccactctactagttgtctcttcattctgttgtttcctttgctgtgcagaagttttttagtttaatataatccctttgtttatttgtgcttttgttaccttgattttcaggtattcataaaatccttgcccagaccaatatccagaagcatttcccctatgttttcttctgtagtttcatagtttttgctcttacatttaagctttcaaaccattttgagttgattatcctgagagcatagattcaaattgccctaaaaatacattcccaatttttgtttttgctttttaattattttttagagacatagtctcaccacattgcccagcttggtcctgaactcctggactcaagtgagccacaactcagccttctgagtagctaagattacaggtatgagccagcatacttggtgttttgagttgatttttgtgtatggtgagagatgagtctactttcattcttctgcatatgaatatccagtgtcccagcaccatttattgaagagactgtccttttcccagtgaatgttctttgtgcctttgttagaaatcagttggctgtaaatgggatttattcctgggctctctgttttgttccattggtttgtgtggtttttaaaaaatacctgaaccatgctgttttggttaccatcactttgtagtatatttcaaggtcaggtagtgtgatgactcccattttgttctttttgcttaggattgctttggatattcagtatcttctgtgatatcatgaattttaggattactatttctatttctgtgaaaaatgtcattggtattttgttaagagtgcattgaatctgtagatcacttgaggtagtatgttcattttttttcataagctatctcttacaggaaagtatgttcatttttatagtaaccattctaatccatgaccatgggatgtttttccttttttatgtgtgtcctctttgatttacttcatcagtgttatatagttttccatgtattcttattttatttttgttgaagtattgtaaatgggatggctttcttgatttctttttcagctaattcattgttggtgtatagaaatgctgctgatttttgcatgttgattttatatcctgcaagttcagtgaatttatcagtcctaagatttttttggtgccacttttggagtttagggttttctatatatttgatcctgtcatgtgcatacagggataatttgacttcatgcttcctgatctgcatgccctttatttctttgtcttgcctgattactctgtctcagaccttttgtactttgttaaaaggtgtgaaagtgggcatacttgttttgtttcagattatagagagaaagctttcagcactttcccattatgcatgatgttagctgtgggtatgttacttattacctttattatgttgaggtacgttctttctattattattataattttttttaattttttttttgagatggagtctcgctctgtcgcccagctggagtgcagtggcatgatctcagctcactgcaagctccgccttctgggttcacaccattctcctgcctcagcctcccaagtagctggaactacaggtgcccaccaccatgcctggctaattttttgtatttttagtagagatgggttttcaccatgttagccaggatgatcttgatctcctgacctcgtgatccgcccgcctcggcctcccaaagtgctgggattacaggtgtaagccaccgcggccggcccattctttctattattatgtgtaatttgttaagagttttcatcatgaggggatattgaatgttaccagaggctttttctccacctatggagataatcacattttttgttcttcattctgttgatttatcatgtttattgttttgtgtatgttgaacccattcttgcatccctagaatgaattccacttggtcatggtaaacaatctttttgatgtacttttggatttggttggctagtattttgttgaggagttttgcatttatgttcatcaggaatattggcctgtagttttcttttgcatgtgtgtgtccttatctggtgcttgtgtcatggtaatgctggcttgtggagtgagtttagaataattccctcctcttcattattctgggaaagtttgagaagaattcatatttaattcccctaaaatgtttggtagaattcagcagtgaagccatgagatcatggactttcctttgatgggtgactttttattactgcttaaatcttgttactcagaattggtcaattgaaattttctgtttcttctaggttcaatcctgatgggttgtatgtgtctaggaatttattttctgtaggttttccaactttttggtttgtagttgttcataatagtctctaatgactctgtatttttgtggtatcagttgcagtgtcatttttgtatgtgtttgattttgagtcttttctcttggttagtctaatggtttcttttcaaaaaatgaacttttcattttgttgatcctttgaatttttttttaagtctcagttttatttattactcttctgatctttattaattctttccttgtaattttgggtctgatgtgttcttttctagttccttgagaagcattgttagatttttcttttttctttttttctttttttaagagacagggtcttactgtgttacgtaggctggagtgtaatggtacaatcaactcaaactcctgggctcaagtgatcctcacacctcagttttgaattcttgggctcaagcagttctcccacctctgcctccagaatagctaggactactggtatgcgctatcatgaccagctaatcttttttttttttttttttttttttttttttttttttttagagataaggtcttgctatatatatggcccaggctggtcttgacccagcatcaagtcgtcctcctgccttgcgctcccaaagcactgggattacaggtgtgagccaccatgcccagccagatctttcttgtttttgatgtaggtgtttattactaaatacttccctcttaaaactgctcttgctgcatcccatacatttttatatgttgtgtttctgttttcactcattttaagacatttaaattttgtttcttaatttcttcattacccattggtcattcagaatcatgttatttaatttccatttatttgtgctgctttaaaagttcctcttgttattgatttctaggtttatttcattgtggtcagaaaggtacttgatgtgattttaattcttttaatttttgtgatttgttttgtggtttaacatgtggcctctccttgaaaatattgcatgtgcttatgaaaaaaaatatgtattctgtagctgttggatgaaaagatctgttagtgtcttttaagtccatttggtctaaagtcagtttaaacttggtgtttctttgttgattttctatgtatatgatctgtccattgctgaaagtagggtgttgaagtccacaagtattattgtattattgtattgtcttcccctttagatctaataatatttgccttacatatctgggtgctctgatattgggtgcatatatatttacaatttttgtatcctcttcctgatttcatccctactgtgtttgatacaaagtctcttatcgtaagtatagctactccttatatagtcatgattgtggtaaaaaaaaaaaaaaaagaaaagaaaaaagaaaaaaaatgtatagctactcctgcttgcttttggtttccatttgcatggaatatattctattccttcgctttcagtctgtgtcttttttttttttttttttttccagacatagtctcgctctgtcacccaggctggagtgcagtggtgctatcttggctcactgcaacctctgactcctgggtttaagcatttctcctgcctcaccctcccgagtagctgggactacaggtgtgcgccaccacacccggctaatttttgtatttttagtagagatggggtttcactatgttggccaggctggtctcgaactgacctcaggtgatccacccgcctcagcctcccaaagtgctgggattacaggtgtgagtcactgcgcctggccatatttgtgtctttagaggtgaagtgagtttcttataggtagcatatagttgggtcattttaaaaacccatttagtatatatcttttaaggtaggaatttaatctgtttacctcaaggttattatttttaagtgaagactcctttcattttgtggttttcagaatgttttgtatatcctttgttcttttcttcatctcttattttttatcattgtattttggtggttttctgtagtgataagatttgattttttttttctcttttttctttgcctatctgctctaccagtgagtcttatacttttatgtggttacataatggtgattattgtcttcttatttcccgatatagcattcccttgatcatttcttgaaaggctggtgtagtggtgataaattcccttaatttttgcttgcctgagacacactttatttctacctaatttttctctttcttttttttttttaagtggagtttcactctcttgcccatgctggagtgcagtggcatgatcttggctcactgcagcctccacctcccaggttcaagcgattctcctgtctcagcctctggagcagctgggattacaggcgcatgccaccatgcctggttaatttttgtatttttgtagagatggggtttcaccatgttggccaggctggtcttgaactcctgacctcaagtaattcgcctgcctcagcatcctaaaatactgggattataggcatgagccactgtggctggctatttctacctaatttctgatggattggtttgctgtgcatagtatttttgaccgatattttttcttttctttcagaaatttggatatatcatcccattttttcctggcctgtgaggtttctgctgttattctaatgaagattcccttatatatgacttgatgcttttctactggtacttttggatttttctctttgtctttgacttttgtcagttcaaatataatgtgccttggaggtgacctttttggggatctttgagcttcctggatctgaatgtccatatctctcgcaagacttgggaggtttttagctattatttcattgtctttttcgttttcttttatttttaatcttgctgtgatctccttagcagctataatttcattaaatatgttttatttttttaatttttttttttttgagacagagtctcgcactgtcgcccgggctggagtgcaatgacgcagtcttggcttactgcaccctccgcctcctgggttcatgcgattctctggcctcagcctcccaaatagctgggattacaggtgcacaccaccacacccagctaatttttcgtacttttagtagagacggggtttcgccatgttggccagactggtcttgaactcctaacctcatgatccacctgccttggcctcccaaagtgctgggattacaggcgtgagccaccacgcctggcctgttttatttaaaaagttgtattaaatatatatttttttctttttttcttttttttttgagacggcattttcacccttcttgcccaggctggagtgcaacggtgcaatcttggttcactgcaacctctgcctctcaggttcaagtgattctcctgcctcagcctcccgagtagctgggattacaggcacccaccaccatgcctggctaattttttgtatttttggtagagacggggtttcgccatgttgcccaagctggtctcaaattcctgacctcaggtgatccacccacctcagcctcccaaagtgctaggattacaggtgtgagccaccgcacccgacctgttaaatatattttctatgccttttgtcatctctttgccttctggaactctaaaaatatgaaatttttttcccttgatgttatctaataagtctggtaggctttcttcactccttgtcattcttatttattcttctctcactggtaattccaaacaaactctttatctttctttgcttgagtaagtttgctattgatgctctctattgtaccttatattttatacattaaattcttcagctgcaggattcctgtttggtgattttaaaatatttctttcttaaatttctctttcatgttatgaattgtttttctgattttattgaattatctttctgtattatcttgtatcctattgagggttttttgtttgtttgtttgtttgtgagacagagtgtcactctgtcacctaggctggagtgcagtggcgtgatcttggctcacaacaatctttgccttccaagttcaagtgattctcctgcctcagcctcccaagtagctgggactacaggtgtgcaccaccacacccagttaatttttgtatttttagtagagacagggtttcaccatgttggccaggcgggtcttgaactcctgacctcaagtgactcgcccaccttggtgtcctaaagtgctggaattacaggtgtgagtcactgcacctggccttgttgagtttttaaaagatcattattttgaattacttttttggtaattggtagatttccttctagcttgttaacggaaagttattgtgttcctttcatggtgacacatttccttgccttttcatgtttctattgtccctgcattgatgtctgtgcatctggtgaaacaatggcgtcttcccatttttctacagtcactttcatagaggctttcacctgcacttggtccttagtgtgctagttgagaagggtgtagtaactctgtttccagataagtgaaatggtatagtctttgttcagctttatcaacagtatttaatgttggcagtaactttgttttcctcagtggcctaggttgtaaaagtttgtagcagtaatggcataggttgttaatggcaagggcttttttggagtcctcctattttcatttgccccacaatgaagttacttagccatgaagatacttcttgctgtcaagtatgatatggcctataggcaggtacagtggctctgggttccaggtgcaggtgctcagggcagctgtgggtctggggttctaggctcagcatctgatgaacctattgtggcacctgggttttgagctatagatttgctccatgtggtagaattggaggtaggtttaccacagagccaagatctgtaactctgatgtactccctagcagcttgggcccaaagggccaggttgtagctttttgtttctgggcggccaggcacagcacaggcccaactctagggaagaagtggtgctttggagtattgggccaaggaaacagaatacagctgcagtttggtaacctgaaccattcaggctcattggcaacttgggtttctggcatagcacagtttttgtttgggccttgggcaatagggagcagcccagtgatgactcagctccccagggagaaagctgtctcagcagcccatacttcagggtgttagtcctgccccctggcagctggttatccagctagctccctaaagtgagtactagagttgtttggcctgtagtgtggggtgtctcatctcatgccctgctttgtttccctggaatgtgaaggcccatgccagctcagcccagtattgcatagctactcagttcaggcaaggcactgcatccccagagggtaatgtgcctcgtcagctcaggtctagggtgtgtgaccttaggttggcccaggcaccattttcctgggatgcaggaagctgcttcagattaggtactggactgtgtgtctgcttgggatggccaagacactgttacctggaaggcagggtggtaggtagggtgctgcttaaacttaggcactggggaggcatgactgctctcgatggccaaagtactgttttcccaggagacaaggtactgcttcagctcaggtacagaggggtgtgactgctctggatggttaatgcactgttttcccaggatgcctggcattgcttcagctctggcctagaggggcaggatgtagcagcatctgggaggggtaggtggaggagcttcgccaaggcatcctttcctcaggaggcaatgtgcagcttcagctcaggtccctggaagcagggcagttttgggagaagtagactgagaggtagacagtgagaggtggatgttgcacatctgccagagcattgttttcccaggagggagtgcacagcttcagctctagtcgaaggtgacaggacacagcctagcatagggacttgaggggtaggtggtgcagctctcccactgcatggccctacatgggaaggtggaaaagctgcttgtagatgttgggccaccaggtgggggtggatggtgatggcttatcctcagggatgaagaggtgccatggaaccagacagaactccagccgttccaaaataacagcacagtagctgtatgggccactgggggcaggacagtgtcagctccttcctcaggagcacagctgtatggactccaggcgggtccgtcagctaagcttagtgcctgtgagggctgtaggggaccccagtggtgagtactgtaggtgtccaaggtggtgatgtacgctgctggtatgctattgctcactttttccacatacggagaaattccttctggttttcagctgatcttggctgggggatggggttgtggagaccaggtgttccattctctgcttggctatcctgagtttctgtgctcaccagagtttttgttattactttgacatattctggtgctttcctttagttatttgcattaaaatgtatttgcttatttattttggctctgtgggggtggggagaacagcatttacggactgctaatctgccttcttgctgaagtcactctcttgctacagatatttggttggaaacattttcgtttgtattctgtaaataactaggagtagaattgctgtgtcatatgatatgtgtatatttacctgtataggaaactgccaagttgttttccaaaatggctgtaccattttgatttctcaccagtattttgtgggagctccagtcctacatctttttgagcacttggttttgttacactttaagtttttcaatttaacagatgtgtagaggtgtctcattgtggatttaaatttcattgctgaaatgactactggtattgagcattttttcatatgttcattgttcatatatctttagttatctttccaaatcttttttttttttttcttgagacggagtttcgttcttgttgcccaggctggagtgcaatggtgagatctcagctcaccacaacctccgtctcccaggttcaagcagttctcctgcctcagcctcccaagtagctgggattacaggcccccaccacaacgcccagctaatttttttattttttgtagagatggggtttcaccatgttggccaggctggtcttgaactcctgacctcaggtgatccgcccacctcagcctcccaaagtgctgggattacaggcgtgagccactgcaccagaccctatctgtccaaatcttttgtcccactttaaattgttttttcttcttaacattgaattttaagaattcattgtatcttttaatattctgaatgctagttatttgtcagatacatgttttgcaaaccatttatctgtatttggtttctttttgttatcttagcagtgtatcctgaagaatagttttaaattttgatgtaatccaaaatatttcggttgtttgtgttctttgttatcctatttttgttgttgttgttttatagatatgggggtctcactacgttgcccaggctggtcttgatctcctgaactcaagtgatcctcccacctcagcctcccatccttgtctacctaattaggctttgtgtaactcagtgttgcaaagctttgacatctgtttgagttaatgtttatatatgttgttacttaagggtttcacattaaatttaaacatacttatattttataaccaaacaagtcatgttggggcatactcattaggattgagtgctttcttacaccaaaatacatgtatacaaagatttaaaacactttcggccgggcgcggtaatcccagcactttgggaggccgaggcgggtggatcacaaggctaggagatcaagaccatctggctaacacggtgaaaccctgtcgctactaaaaaaatacaaaaaattagccagacgtggtggcaggcgcctgtagtcccagctactcgggaggctgagacaggagaatggcatgaacccgggaggcagagcttgcagtgagccgagatcaccccactgcactccagcctgggcgacagagtgaaggctatgtctcaagaaaaaaaaaaaaaaacttttataataacaactgtaaatagttcaattgacagtcatttgtaagatgtttaagtaaactgtgaaacagtaagtaaatggatgaaaacacactgattaaaactgctgcttttatccaacaagatggatgaatttcccaggaaagaatacttgagttcaggcctgttcaagtcccaacctgtttgtggtttgaggttgctctctgcctcgtagagcaaagtggaaaatttatcttctgggaggacagagttttcttctctgaaaaagtttcctacatagttggctttggcatttgcaaggaatgaaaggtcagggattgaggcctcatgagtctggatttctagctgaggttgagagaaaaggtagtgattgtaaccagaaaatccagagtgggtgtatttacctccagaactcatcacttaaaaaaaaattttttttgaactgacatgcttgaggctttttcttttttttttttttgagatggggtcttgctctatcccccaggctggagtgcagttgtgcagtcatagctcactgtagccttatcctcctggcctaagcagtcctcctgcctcaacctccctagtagctgagaccacaggcgcatgccacctgtgagtttctagagatgaggtctccctatgttccccagcctggtcttgaactcctgggctcaagtgatcctcctgcctcagccttccaaagtgttggattacaggcgtgagccactgtgcctggccagagctcatcactgttaactcagcctgggtttttcacagcagtcatggaaatagattcattaataatagtaacaaatatatagtctccctctcaaagaaaccttgagtggcagtggcataccagatacacagtaggaaatactgtagaattatgttgttaagttcataaccaaacatcatacatgatgataaaagacaagataatggtcacatttatgcagtattaactgagagggcaaatttgtgcctgagaagctattgggaatgttctctctctttgcattactaggaattacatgggaaacacatgtagacagtcttcaggctattaagatttgtccacttaatctttacttatacatgaataaaaaatgggaaaacatgataaatataataaactaatacactcaaccctgccccttgattatataatagaacaaaatcagcatgcccggcatgagcctgccagattgccaattccatcctccaccttcagaggatgccgccatccagaattttgccttactcattttactttcttcatagttcgacaccttaaatgtatattactaatagtagctttgcatttttggctgatttaaaaattgatataaatgaaataatgctgtagagatgctttttggtattaagtggatatactgttattcttaaagatgtttgaaatgaatatacctttctaaatatctttttaaaataatacattaaatgatactgctttagaattcatgaactgcatctcatgagaatatgtagagatgacgtgggcaggtaaagtaaaacttcaggttgaatatcctatgataatttaaaaatgacaaaatagtgtggtgaataatagagcttgagcactttaaggcaccgtagggaccccttcaatgtaatgatgacagtgctgaggtgcagagaagttaggtaatcagcccaagccactactctaaggacagaccctatctacttttcctaatttgtcagaagactgcctatgatactactaataaaaagtcctatgaaattggtattgtcattattttacaaataaaataatcttcaatttttgtttcctctatgcatgggttacttagtattttgtaatttgaatttcaagcataattaaaaagaaatcaggtatctaggctgggcatgatggctcaagcctgtaatctcaacattttgggaggctgaggcaagaggatcacttgaggccaggagtttgaggtatcttttgttgatctctacactgattgtattctctcttttattctatgaaagttaaagattttttctgatactacatattgtcagttttttaaatactcagtttgtgctaaaagaaaacattcggcaactgatatctgctgttctgtatgtatctgtcagtccagatttgtccattatggtgtatgaatctaatagaacctcaccaatgttatacctgccttcttgaaatcattactgagatagctaatattaaaatatcctggtttgtctgtatatttaattctttactctcattatactaaatttttttaatgtaatttgaattgatggtaaaaattgtatacaggccgggtgcagtggctcactcctataatcccagcattttggaagtcctatgcaggaggattgccagaggccaggaatttgagatcagcctgggcaacatagtgaaactctcatctttataaaaagtaatattaaaatttttaaaagtgtataaactgtaaagtatattttactggtgttttcttccttattcctacttgtcagatgcaaatacacatttttgtgtgtttgtgtttagtaattataagtatacatatttcattcttctatttcatatatttctatgacattatatcttagatgtgtaatttatgaactactactggattattttaatccattagaaattactattcacgcattctgtattcaattcatgtgatagctaatatatttggttttaaatgcatcttattttgtggttttcttctaggctgttttttgtgctttcttttaaaaatatataggttttaataatcttaattttcttttagtttgaaatgtatatactcattttattcattagtctaagataagaattgtaacacttctctaacctattatagaattgttaatacctttacccttctcttgaacacatcaaaggatgtcattgagtgttggtattggagtatagcatatctattattctgctcaattagaagatattgttcatgttgtatagagataataagtaattgtattgatctgcagatgcatccatctcttggattctcattccttctaccactgcagaactttcacctgtaatcactttcctttggccttaaggataacttttagggttacttttctactaaatttccaatttttgaccagatataatcttatattgtgctcttcctgaaaaatactattgttgtggatagaaatctgggttggtagttatttcttcagcaatttgaccatgtcattccactgtgtccctggcctcctgtatactggatgtgaatggatacaattatatattgtgtttatagttttcctgtgctataggaacagtattcgaatctgatgcaaaggacaacacaccctagagattgtaacagtgagatgaaccaagtgattggatggggttttgagttgctggaataatggagttacagtgtacaatgcataagcaacataataaattatatatctggtgaacaaatggatggattgtgccatgaactggttagatgcttacccacatgtcacagaaggtcttcacttgcaaggagggtgggaaatacctcttggtcagctctcaacttgtgcagcatcaggcctctttcaatggggaagagccacacaggagcaatgagagtggggaggcttttcacactggacaaagggattccaagtacagcaattgtgggaaagccttttgctgcaaatacatactttttcagtatcagaaaatccatgctggagtaaacccttatgagtgcagtcagtgctggcatacctttaataacagctactattctatagttacccaagagaattcacagcaaagctgtgccttatgagtgcagtgattatgggaaattatttggctccagctctaatctccatatacaccaaatagttcacacaggatcaaggctttaagagtgtgttggccaggcatggtggttcacacctgtaatcccagcactttgggaggctgaggcaggcggaccgcaaggtcaggagttcgagaccagcctggccaacatagtgaaaccccgtctctagtaaaaaaatacaaaaattagctgggcgtggtggtgcgcgcctttagtcccacctactcgggaggctgaggcaggagaattgcttgaacctgggaggcagaggttgcagtgagccgagatcacgccactgctctccagcctgggcaacagagcgagactctgtctcaaagaaaaaaaaaaaaagtgctgaatgtgagaaagcctctatcactagacctcatcctgtttagcaccagagaattcatagtggagaagaccttatgagtgcagatcatgtggcaaattctttataaagacacatttgttgagtaccagaaagtccacaatggaaaaatatcttctcagtgtggtgaacgtgagacattctaaagccacaattcttaccgtggttaggctttgtgtccccacccaaatctcatcttgaattgtaatccccataatccccagtgaccagggtaggacctggtgggtggtgattagatcatgggggcagtttcccccatgctcttctcctatagtgagttctcacaagatctaaggggttttttgtttgtttgtttgaaacggaatcttgctctgttggccaggctggagtgcagtggcatgatcttggctcactgcaacctccgcctcctgagttcaagtgactctcctgcctcagcctcccaagtagctgggactacaggtgtgcgccaccaggctcagctaatttttgaatttttagtagagacggggtttcgccatgttggccaggctggtctcgaactcttgacctcaggtgatccacccatctcagcctcccaaagtgctagcattacaggcatgagccaccgagcccagccctcaatctgatggttttataaggggctctttcctgttcgctcgttcgctctctctcacctgcctccacgtaagacgtgtctttgcttctctcttgccttctgccatgattttaagtttcctgaggcctcccgagctatgcagaactgtaagtcaattaaacctctttcctttataaattacccagactcaggtatgtctttatagcagtgtgagaatggagtaatggactatcttgtaacatgttagagaattcacaatggaacaagatcttgtgtgttcaggaaatgtgggaaagcagaaattcccacattgcttggcaaatgaaagtcaaccagagaaaggccttttgtagcagatataagaaagcatacagtgaaggcctaacctcattaggcatcagaaaatttacactggagagaggccttaagagttcatggaatgtgctcattgtttaacatggcatgatcctaagagaaaatctctgagagtaacctttgagagggagctctaagccaggatttgaacctcagacatatgtgtattcacactgtggagattacctacaactgcatgagtgatcagaaacaaatggggtcctcatctatttccccttagtggtttcagcgtggatattatccagctgcagcctaaaagatctgagctggggcctgctgtggatttcaagaggtccccatccttaataaacagtgttgaccccacatggtagctgagatggatttctccaaccagcttcccaatccaccaaccttagatatgcccacctcatgatgttctcatttgtgcagagataaatgccatagtgtttaacccttcaatctgttctgttcattgtgtgggactgattgagaaaagaagggctttgctagcagggaccaccaactttatgtgcctcagagtggacagcaggatggtagagagtagctctaagtctagtttggcctgttttgcaatgctacgcaacgtctcttagggaaaactgtagggcattgtgagactgatcttgtgacctggatgtcaggatctctgtgagccctaagctcaccctcatgagggagtagttggtgtgacaacctccagtgcttctagaaacagcataagttgagtccctttttcccagaggatgtgtcatattccatcaattctgttgaggggtggctgtctcctaggacctctatgcagaggacattgcccctgaaatctaaaatctggtaggcatgtaagacctacaggggctaagcaggaaacagatacagaaacactacatacagaaacattggatagtagggagtagtggagactgggaaactagaagttatgtgtgtactctaaagggggatacacaaatttaatgtaactatgactctgcgatgagggtgtacaaaaattctcacgaccggctgagctccttttctcctatggctgaggccggtgtgagagcaaacaatctgaaagtttgtgaattcctgtacctccctgggctgttgacattttggtcatcactgaacaggcaggaaccccaggactgacaaaagagagcttggagtcgatcgtgcatcttttgtgacccagtcagcatgtgggaagtgatggccttcattgctttctagtttttgctgccactgaaggagggctgactcaagatatgggaagagggagagagttgaataaatacaggattgattgattcagatttttatgtggaaacttttttttcttaacacatcaatgatatataattggcatacaataaactagacatattgaaattgtataatttgataaatttcgacatgtatacacatgtcaaaagtttcctcatgccccttactaatctcctcttattctccaatactttatccccatgtgaccattgatttgtttaatgacactatacattagttagtattttctgaaattttatataaatgtaatcatatggtatgtgtttattttttatctgtctttcagtaaactgtttctttttagatttggggggtacaagtgcagttttgttatagggatatattatgtattggtgaagtctgggcttttagtgtgactgtcacccaaatagttcacattgtacccaatagacaatttctcatttttcaccttttttcccttgttttgtgggtttattttcaacttttattttaagctcagggggtccatgtgcaggcttgttacaggggtaaattgcatatcactggggtttgatgtacaaatgattttgtcacccaggtagtgagcatagcacccaacagaaagtttttttgttttttgtgtttcccttacccttctcccacactctcccatcaagtaggccctggtagctatttttcccatctttgtgtttatgtgttctcattgtttacctcccacttataagtgagaagatgcagcatttggttttctgttcctgcattaattcatttctgataatagcctccagctccatccatgctgctgcaaaggacatgatgttttttatggttgcatagtaatccatggtgtatacataccactttctttattcatttcactgttgatgggcatctaggttgattcatgtctttgctattgtggatagtgctgcaatgaacatacaggtgcatgtgtctttttggtagaacgatttctattcctttgggtacataaccagtaatgggattgctgggtcaaatggaaggtctgttttaagttctttgaaaaacatccaaactgccttcctgaatagctgcactaatttactttcccagcagcagtgtataagcattcccttctctccacaaccttgccaatatctgttactttttgactttaaaacaaccattctgactgatgtgagatggcatctcattgtggtttgatttacatttctctaatcattagtgatgttgaaccttttttttcatatgcttgttggccacatgtatgtcttcttttgagaaatgtctgtttatgtccttggctcaattttttaaatgagattggttgttgttttgtttgttactttgcttaagttccttatagattctggatattagaccttgtcagatgcacaggttgtgaatattttctcctattctgtatgctgtctgtttactctgttggtggtttctttctctgtacacttcagtttaattaggtcccatctgtctatttttcctttgtttcaattgcttttagagactttgtcatgaaacctttgccaaggcctgtgtccagaatgatattttgtaggtttcttctaaggttttttatagatttaggtcatacatttaagtctttaatccattttgaactgatttttgtatatgatgaaaggaaggggtccagtttcagtcttctgcctatggctaacctgttatcccagcatcatttattgaaggagagtcctttccctattgcttgttattgcttactttgtcaaagatcagatgtttggagatatgtggctttatttctgggttctttattctgttctagttgtctatatgtctgtttttgtatcaatatcatgctgttttggtcactgtagcctttaagtatagtttgaagttgggtactgtgatgcctccagctttgttctttttgcttaggattgctttggctatttggactgttttttggttccatgtgatttttagaatattttttctgattctgtgaaaaatgaaattggcagattgatgaaatagcactgaatccataaattgctttgggcagtatggctattttaacaatattgattctttttatccatgagcatgaaatgtttttccatttgttttggtcatctctgatttctttcagcagtgttttgtaattcttgttgtagagatctttccactccctggctagctttattactaggtattttattctttttcttgactattgtgtatgagattgcattcttgatttggctctcagactggacattcactgtatattattggtacatagaaatgctgatttttgtacattgattttatatactaaagctttactgaagttatcagttctaggagcttttgtgcagagactatggggttttctaagtatagaatcatatcctctgcaaagagagatagtttgacttcctctcttcctatttggatgccttttatttcattctcttgcctgattactctggctaggacttccagtactatcttgaataggagtggtaagagtgagtatcgttgtcttgttctgattcccaaggaaaatgcttccggcttttgcctgtctggtataattttagctgtgagtttgttatagatggcttttgttgttgctttgagacaaggttcttgctctgtcacccaggctggagtgcagtgatgcaatcacagctcactgcaacctctgccctcctgagctcaagtgcctcccacctcagcctctcgagcagctgagactacaggtgtatgccatcacacctggctaatttttgtgtattttgtaggaacggggttttgctatgttgcccaggcttgtctccacctcccaaagtgctgggattataggtgtgagacactgcacctggcccatagatggctcttattattttgaggtctgtttcttcaatgcctagtttgtggagggttggaagggttgttaaattttattgaaagccttctgtgcatctattgagataaccatgtggtttttgtttttttgttctgtttatgtgatgaatcacatttcttaatttgcatatgttgagccaactttgcatgccagatataaagcctgcttgagtgtggtgatcgtggtggattagctttctgatatgctgttggattcagttaactagtattttgttgagaattttgcatttatgtttatcagggatattggcctaacattttcttttttcattttgcctctgccaggttttggtatcaggatgactctggcctcacagaataagttagggagtagtcccgcctccttgattttttgggaataatttcagtaggattagtaccacgtctttttacatctggtagaatacaactgtgaatccacctggtccagggctttttctggttggtagctttttaattactgattcaatttcagaactcattactggtctgttcaggatttcaatttcttcctggttcaatcttaggaggttgtatgtttcaaggaatgtatccatttcttctaggttttttagtttgtgtgctaagtttttagttcttaatagtctctgagagaattttgtacttctgtggggtaggtggtaatgtcacctttaacatttctgattgcgtttttttgcatcttcttttttccttattaatctagctagtgggctaccagtgttgtttattcttttgaaaaaccaacttacggttttatgatctttgtgtagattttcacatctcagttttattcagttcaactctgatattggttatttttctctgctgcttttctttcttttggggttgttttttttttcttttagttcctctaggtgtgatgttattttgttaacttgagatttatctaacttcttggtgtaggcattttgcactataaactttcaacactgctttagctgtgtcccaaagattctggtatgttgtatctctgttttaattagtttcaaggaatttttttatttgtcttgatttcattctttacctaaaacacattcaggagaagattgtttaatttccatgtaattgtatggttttgagagttcttctaggtattgatttctgtttctactgtgctatggtctgagagtgtggttggtatgactttttttttaattgttgagtattgctttatggccaagtatgtgattgatcttagaatatgtgacatgtgcagatgaaaagaatgtatgttctgtggttgttgggtagagtattctgtagatttctgtaaggtctatttggtcaaatgtccagtttagcttccaaatacctttgttagctttctgccttggtgatgcatctaacactgtcagtggggtgttgaagtctcctgctattattgtctggttgtctaagtcttgttgtaggtctctaagaacttgtttcatgaatatgggtgctccagtgtttggtgcatatatatttgggatagttaagtcttgttgaattgaatcctttatcactatgtgatgcccttctttgccttttttgatcattgttggtctaaagtctgtttcgtgtgaaatagcaatccctgctcttttttttcccatttgcttgatctttctccatccttttactttgtgcctatgggtgtcattgcatgtgagatgtgtctaatgaagagaatacacagttgggtttcatttctttttccaacttgccaccttgtgccttctaagtggggcatttagcctatttacattcaaggtcaatattgataagtgaggatttgatcctgtcattatgttgttagctggttgttatgtggactttattgtatagttggtttgtagtatcaacaggatatgtgctcaagttgtttctgtggtggcagatactcatcttttgcttctaggtttagcactgttttaaggacttcttgtaaggcaggtctggtagtaatgaattcccttaacatttgtttgtctgaaaaagattttatttatccttcacttaatgaagtttagtttggttggatattaaattcttggttcaaatttctttcatttaaaaatgctgaatataggcccccagtctcttccagcttgtaaactttctgaaaggtccacggttagcctgatcgggttccttttgtgggtaacctgccacttctctctagctgcctttaatgtttttcttttgtattgaccttggagaatctgatgactatgtgtcttagggatggtcatcttgtataatatcatctcacaggggttctctgaatgtcctgaatttgcatgtcaacctctctagtgtggttggggaaatgttcatggacagtatcatcaaatatgttttccaagttccttgttgtctctccatctctttctggaatgccaatgtgttataggcttggtctttttacatatcccatatttcttgtaggttttattcattttttaaaattcttttttctttatttttttctgctgtattggttcaaaggagtcgtgtttgagctctgagattattttctttttttttgtgggatagcaaacacttatttgaagaacttttaggataaaatttagtttacctctgataaagctgaagaaaaatgattgcagtttttatgcattaaatgataaacattgcctttgtattcttttcccagttcttctacaattttttctatatcatcttctaggaagtccgtgctccctaaaacaacttctttaaatttaaatggttctcctagttcagaagcatttcctggggaaatttcaaatattccagaaaaggggtaaggatggccaccataagcaaattctctgccatagacttcaatttctgaatgaaaaactccaattccaatggatgaggtatattccttcatccaatacatgtcacacacgttgagcaccactaactggttagcccccatcctcctccccgcggccgccgcctagtcctcaagccgctcggtctccgcggggccggaggccgctcccacccccgcgggcgcttcaaggggcctgagccgggcactaagcgtacagccctgcccgtggcagccggggcagaagcatcgggcagccaagccactcccgggcgccaacgacaggagcctctgtgcggacagggccggacagctggcggcccgctccggatgaggcacctcccctaggcggcagacacatggggaaaaactgagctctgagactattttctaagcttggtctattctgttgttagcgcttccagttacattatgaaattgcaattgctgtagttaatttcttatttccagaagttcagtttgatgactctttttcttttctttcttttttttctttctttttttttttttttttttttttttgagacggagtcttgctctgttgcacaggctggagtgcaatggcatgatcttggctcactgcaacctccatctcctggatccaagggactcttgtgcctcagcctcccgagtagctgggattacaggtgcctgccagcacacccagctaatttctgtatttatagtagagatagggtttcaccatgttggtcaggctggtttcgaactcctgacctcaagtgatccacccgcatcagcctcccaaagtgctgggattacagacgtgagccaccgtgcccagcccattttggttctttgttaatatggtaatattatatttaaactcttggattgcattattggtttccttggatttttccttccttgccatccagactctgaattctaagtcatttcagccatttaagcatggttccaaaccatcactagggagctagtgcagtcgtttggagacctttagagttgccagaaatcttgcactggttctttctcatatgtgtgggctgatgttccttgaatctttgaagttgctctcctttggatggggctttctgcttttatattatttgatgcccttgggagttttactgtggtataagttgggtttagtttcatggtttcaattatgggtgctttcacaggccaaggctcagctgagcactcctgagctgcatgctgtaaacctgggtagaggggattaagcccttggctttgttctctggctgcttggggtgaagcacctgctgtgctagaggggctgaggtgttctcagtctgctggcaaaagtgctccagcagagcattgtggggactgcagagagtgcactgtggctgggggatggggaggccacaggcaagtgtgcaccacttgggcagtagaggggggctacctgcaagtgtgtgccaatggggtggcatggctgtggtgtaggtgagtgaagcaccatggtgtgaggggtccccggcaatgcctcccacctttttgaatctccagtgtctattattccactatttccatatgtatacatcatttagctaccacttataagtgataacatgcagtatttgactttgtttctgaattatttcacttaagagaatggccccccagttccagccatattgctgcaaaagccatgattttttttaatgactgagtagtattccatggagtgtatatatatatacacatatatacatatacatacatatatatacatatatatacatatacatacatatatacatatatacatatacatacatatatatacatatatatacatatacatacatatatatacatatatatacatatacatacatatatatacatatacatacatatatatacatatatatacatatacatacatatatacacatatatatacatatacatacatatatacatatatatacatatacatacatatatacatatatatacatatacatacatatatacatatacatacatatatatacatatatacatatacatacatatatatacatatatatatcgcattttctttatccaatcatctgtcgatggacacttaggttgattctatgactttgctactgtgaatagtgctacagtaagcatgtaagtacaggcatctttttgatatagtggtttattttcctttaagtaaatacccaatagtggaattgccagatcaaatggcagttctattttcagttctttgataaatctccatactgttttccatagaggttgtactaatttacattcccaccaatagcatataagcgttcccttttccttgcatccataccaacatctgttggttttttactttttaataatagccactctgaccagtataagatggcatctcagtgtgtttatgtgtgtgtgttttctctcatcatatctcattataacctcaaattcctgggctcaagcaatcctcttgcttcagcctcccagtgtctaggactacaggtgtacaccatcatgccttgctcttttttttttttttggtagatataacatcttactatattgcccagggtggtctcaaactcctgacctcagcaattattttgtgttggcatcccaaagcactgagattacatatatgagctacctccctaaaataagggaagtgagccagaagctctgggcccagcccatgatctcaatcggggcgaatatccccgcctcctgacctcaattttcctaagctagaaaggacctttcgaccctccgacttgtgcccatagtaaagcggcggccctaagacgacgcgggggtccttgtgcgcacttaaatggagtcggctgcgcttggtgagttcccacacccggtagatgtgagggaaaaactgccttactcagaaggcaccaccccttgcgtcggccgcggactctaggccaatgacgggccaggacacgggcgatttctgcgggccagggcggcggaggtgggacttccgcttcgtcgcgtgacgtcatctccgtgagcaggattggccctggaacagtgtggggcctggaccgctgggtaggcgcgtccagcggcctgagcaggggagggtaatgaggctgttacgcgccttctccgcatcttggcgggagcctgacgccccgcttcttccctaacggggtgttccaccggcgcctgccgaggcctaggcctccgcagccgccctccgtctcctcagccccgacgctgcgcccgctttgtgcgcatttttctctggggaaactgaggctccgagtgcgaaagtcagccgaggtcgccccgcccaggacagagaagggctgggggtcggctgagccgcggcattcccgggccccgctagggctgcagggtctcaggatggcagcctcggcgcaggtgagtggacgaggttttggccttgctgctgctctgctacttctggaggcctcgtgggcaggcagaagccaagacagccacaggatgtttctttgtcgccgtcgtttatttaagagaagtggccgtagcttgtcatttcctttatccgcagtcctgcaatagtgttggcctccgacaggtgctcagtccttggtagaaggatgaatgatgcttccttcatggatctcatcacacttcccttaaatccaacctcctctgttgcctgccagcccctaccccatccacctggccaaccacccctgaccttgtctctccatttttcccttgtcctttgctcttcagagccaccaacctgaccgtgcagtcttcttcctttttccaggctttctctttgcacttccctttgccttgaacactgcccctataacttcgcagggcctccctctcatatctttctggcctctgtccagatgtcacctatttggaggtggctttcttggcaattccggctaaagtggcgccttacgcacttgcccatttttggcaatgtgtggcatttttgtatagagaatctgacgatattaaagaagcttgccgtttgagttggtctaggatgttatgtgaacaaagagaaacgaaataattgcaaagagtgacagctgatcataaagagtccttgctgtgggctgattggcaggcattatttaaccctcagctcctttaatcctgaactccttagaattaggttctcttgtcctcactgttttacacaagagcagctggaggctcacataggttcaattacctgccttacatcactgtagctcttaagtatcagaaactaacaactggtgtgtctaccatcacagcctgtgtttttaccctcttctttgcccgcaatggttagggaggcctgggggtgacacctaaagtaaactttgcaagttgagcaggcttccttctagcaggtggtcttggacatgaggagtcatggcatttcatgctggtggaactgtgtggactaaaaaaaaatggtttattggttgtttaaggagtccgcaggggacccgtgtggcttccacagtggtttcctgagtggttttctcctataccagctgacacatgtcttgggacacaagattttgtggtcttttgctagatgtgccttcctccttagccaggacagacatagccagtcaggggcccatgttctcatggctacaacctgctgtgtcctctgtgactcttgttccttgctcctgaagtatcctgacctcagggatacttgttggtaggactcaaacaggaaaaggtagtgatagctcgttgtggattcttcctatgagaatgggcatctgtgaggcccagaagtgtccgaggcagcagatgcaggtccaggccctgccacttttgaggcaggtgccaccacctcaggtgactcttctgtgaggtaggtgattatgactatgctgctctgcccaggtccatgaaaatatttcaagtggctaaccccagcacagtggcatgtgtctgtatatccagcttgggaggctaaggcaggaggatcatgagttcaagcccaacctgggcaaaatattgagaccctgtctcaaaaaaaaaaaaaaaaatcctgaaaatattttcagggtggctcaaatggatgtatttcaatgtttcccatcctcattaactgtgcattaactttgctaatgaaggagtgtcgggttgcatgattagaacatagaccatagggccctgggttcaaattctgtctctcctgataagagatgtgactttgggtagactagtggaggtcctggacctcaagtctctgagtgtgacatggagatgatgatggtgaactcaggagctgtggccctttgccccagtgtttcctttacagcttttcttcagatcttttgactattcttggtgaagtggaaaaccctgttgtgttgacctggacatcagggctcagataaatgaaatgagatttccaaggtcacatagcaggcttgtgttgatttcaggaatttggttttaaacctcaggagtctgactcctgagctggggacttttagtcactttaccatggcatgtaaagccattagcatgaggcaggctcacagggaggatcggtaagactcaggtgctgttcttgttgttgttgctggtgttgtttttgttattattctttcccattcctctgatgtctcagagcacttactgtcttgcctctcagtccccttaggattgtcctaaccttatttctgtgtgaagtggctttctgcataggaggcttctctctcttcactgctgtaatttttttttttttttttgagacgagtctcgctctgtcacccaggctggagtacagtggcacgatctcggctcactgcaagctccgcctcccgggttcacgccattctcctgcctcagcctcccgagtagctgggaatacaggcgcccgccaccgcgcccggctaatttttttgtatttttagcagagacggggtttcaccatgttagccaggatggtctcgatctcctgacctcgtgatctgcccttcatggccccccaaagtgctgggattacaggcgtgagccaccgcgcctgaccgacactgctgtaatttatccaaggcaatgtccacattcccctcatgcctggcacagatcatggccctctagagatgcttggtgatttgattcttgggtcactgcgcatcttttgcagtgctgaagtgacaagttctagttgtattccacagttccaagggaaacactactatctctgtttaattttccaggtgtctgtgacctttgaggatgtggctgtgacattcacccaggaggagtggggacagttggatgcagcccagagaaccttgtatcaggaggtgatgctggagacctgcggacttctcatgtctctgggtaaggccccttctggtcctgtgctcccttaggattgagttctcctactcatgttcccctctctcctccacagcccacttgttctgaggctcctggcaccacgcaggggtgttcaccattggctctgagcgtagcacttgggagaccagggtctggtgtccaggagtccactcccatctccactgctcatgatccctgtgttcctgggcaagttaaggaatccctctgtgcctcagtttttctcatgaataaaaagggccaggccaggcacagtggctcatgtctgtaatcccagcactttgggaggccgacgcggacaaatcaggaggtcaggagtttgagacaagcctgggcaacatggtgaaatcccgtctctactaaaaatacaaaaaattagccgggtgtgatggcgggtgcctgtaatcccagctactcaggaggctgaggcaggagaatcacttgaacccgggaggcggaagttgcagtgagctgagatctcatcactacactccagcccaggcgacagtgtgagagagactccgtctgaaaaaaaaaaaaaaaaaaggccaatatagtatttgtttcatagggctagtgtgagggcaaatggttcagtagagtgtgttgtgataggtggctgggcgcaggttagcaattgtgacctctgttgctgtcactattgtcactgctgtctaaatcattgtcctcataatcagcagtatcacacttggactccgcagtttttggaacaactttgtatagttttttagttaaattggccagatgcttttgatgactagactcaggtgtacattttggcttggccattcgccatttcccagattttggcaagtcactttatctgcctgagcctcgatctcttcatctataatgtggtcctgattgcagtacattcttaatgtgcatcctgtgaagaaatcctaaaatagaatttttcatgcagggaccataggagtagcaatgtaatgctttgcttagaatgtaaaaaaaaagccttaggtcagtgaagaaacttacctttctcctgaatggagactcagtatctcaaatatgttatttcttttctaaactaatgactaaatttaattgagtgtttataaaatacaatgcatttaaattgcttggcatattccctaggttatagttacattgtataaatatcagttattgacatactattaggagtaaagttctatggccaggtggcatattgattaaggacttggatttgagagccacagcagcaaagtctctccaagaagtgacatttgagctgagacccaaagagtgagttgattagaaggagcaagatagaggagcaagtagtattccaagtaggcaggctggcatgtgcaaaggccctgaggtggtgaagagcatgatcctgacaaagctgaaggaaggtctgattcccctttttcactgcactgtcattgaacccagtgccaagcacatagcaaaaatgagtgaacatttgcttagagatgactgatgaatcccaccctgtgtttttgtgggtcctactgcctgtgccattaacttctccatagagtacttatgtcttttacccccttatattttgaaaagttttgggctatatgtgcagatcagctcatacagtcttaaccctgaaggaaatatattatctcacctaataagcttagtggtaaggctggctcctgggttggtgggtgtcaagccagttgtctttctttgctcccactttcttttttcttttttggagacagggtctcactctgtaacccacactggagtgcagtggtacgatctcagctcactgcagcctcaccttccagtctcaagtgatcctcccacctcagtctcctaagtagctgggaccacgggtgcatgacaccacacccggctactttttgtatttttagtagagatggggtttcaccatttgccctagctggtctcagactcccaaagcgttgggattacaagcgtgagccactgtgcccagcctctttgctccctcttcttggtaaggtttttaggcaggttccctcacagaattcccaggatgctgcatggcagcaggagtggcagcctccctcatttagcccttcctgaaagagaaggttttttctctctttggagtggctggtataggtcacctgcctacctcagagtacagttgatcagggttgccatttgcaagatgatggagaccaggacttttctactgccatggggactaattataaaatcccttcagaaaatttgtcttaacagggttgagatttttgtaggatggagattaaaagtaattggtactatcacacagccagcactactgcttacagtctttggggcccaatgaggatgttttttttctctttttttgagacggagcttcgctcttgtcgcccaggctggagtgcagtggcatgatctcggttcactacaacctccgcctcctgggttcagcctcccgagtagctgggactacaggtacccgccaccacacctggctaactttttgtatttttagtagagatggggtttcaccatgttgggcaggctggtctcgaactcctgacctcaggtgatccacctgccttggcctcccaaagtgctgggattacaggcatgacccactgtgccctgccagatggtgtttttgtggttgttttatggtcacggttcaacgttttctttgcttggctgagaatagcttcacttcatggtcttccccatcctgcagtcccagatcagattgacaggtttctttcttctaacctaactccctgtgtcctcttttgttctccatgcacaggctgtcctttgttcaaaccagagctgatctaccagttggatcacagacaggagctatggatggctacaaaagacctctcccaaagctcctatccaggtaggagccaacagctgggaaggtgggggtcatggcagcttacacatggaaaagtgaacactgcctctgaattttgtgggcaatcttcttattgtggtctctctgggtgcttgggatccatggagcctctccccgcccgcccccccccacccgccttcagacagggtttcactctgtcactcaggctggagtacagtgatgtgatcatagctcactgcagcctcaacctcctgggctcaagggattctcccacctcagcctcccgggtagctgagactacaggcatatgcaccatgcctggctgagtttttaaaattttttatagagatggtcttgttatgttgctgaggctggtctcaaactcctgggttcaagctctcctcctgcctcagtgttcgaaaatgctgagccaccaagcctggcctcttacatcttaaatttaagtacttccaagttaggtcccagatgtatatatttcactaacgcataataaaaaattatggctaacatgtatttatttcttactcagtgccttgctctctgccgacgatagtatatgtagtgtttcacttcatcttcactatagtcttacaaggcagactctatttttggccctttttgtttgtttgtttccgagatggagcctcccactgttgccctggcaggagtgcgatggtgcagtcttggctcactacaacctccgtctcctgggttcaagtgattctcctgcctcagcctcctgagtagctgggattacaggcgtgcaccaccatgcccagctaatttttgtatttttagcacagacggggtttcaccatgttggccaggctggtctcaaactcctgacctcaggtgatctgcctgccttggcctcccaaagtgctgggattacaggtatgaatcactgtccctggcctttgttttttctataatgccatctctaataagcctttttgtgtattgtgttcgttccaggtgacaacacaaaacccaagaccacagagcctaccttttctcacctggccttgcctgaggaagtcttactccaggaacaactgacacaaggagcctcaaagaactcccaattagggcaatccaaggatcaggatgggccatctgaaatgcaagaagtccacttgaaaatagggataggcccccagcgggggaagctgctggagaaaatgagttctgaacgtgatggtttggggtcagatgatggtgtatgtacaaagattacacagaaacaagtttcaacagaaggtgatctctatgaatgtgattcacatggaccagttacagatgccttgattcgcgaagagaaaaattcctataaatgtgaggaatgcgggaaagtgtttaaaaagaatgccctccttgttcagcatgaacggattcacactcaagtgaagccctatgaatgcacagagtgtgggaaaacctttagcaagagcactcatcttcttcagcacctcatcatccacactggggagaagccctataagtgcatggagtgtgggaaggcttttaaccgcaggtcacacctcacacggcaccagcggattcacagtggagagaagccttataagtgcagtgaatgtggaaaggccttcacccaccgctccacttttgtcttgcatcacaggagccacactggagaaaaaccctttgtgtgcaaagagtgtggcaaagcctttcgagataggccaggtttcattcgacactacatcatccacacgggagagaagccctatgagtgcattgagtgtgggaaggccttcaaccgccggtcatacctcacgtggcaccaacagattcacactggagtgaaaccctttgaatgcaacgagtgtggaaaagctttttgcgagagtgcagacctcattcaacactacattatccacactggggagaagccctataagtgcatggagtgtgggaaggcgttcaaccgtaggtcacacctcaagcagcatcaacggattcacactggggagaagccttatgaatgcagtgaatgtggaaaggccttcacccactgctccacttttgtcttgcataaaaggacccacacaggagaaaaaccctatgaatgcaaagaatgtggaaaagcctttagtgatagggcagacctcattcgccacttcagcatccacactggagagaaaccctatgagtgcgtggagtgtggaaaggccttcaaccgcagctcacacctcacgaggcaccaacagattcacactggagagaaaccctatgaatgcatccagtgtgggaaagccttttgccggagcgcaaaccttattcgacactccatcattcacactggagagaagccgtatgaatgcagtgagtgtggaaaggcttttaatcgcggctcatccctcacacatcatcaaaggattcatactgggagaaaccctaccattgtaacagatgtgggaagaccttttatgactgcacagacttcagtcaacatccaggaacttttattagggaaagagtttttgaatatcaccactgaagaaaatctgtggtgaaagggaacatcttaccatctggccattcacactgaagagaaacttcataagcatcctctctttgagaaaacgtgtaatagatgatcatttgtcgtctaaacaatcaagttagaaattgaaccagcctggagtcttattctccacctgagaattcacccatgagagagacccagtggttgctatgcacttaggaaaactttcagccacatctttcttcttagtttacagtgaaatattatctcagggatattttttttttttttttgagacggagtctcgctctgtcgcccaggctggagtgcagtggcgggatctcggctcactgcaagctccgcctcccgggttcacgccattctcctgcctcagcctcccaagtagctgggactacaggcacccgccactacgcctggctaattttttgtatttttagtagagacggggtttcaccgttttagccgggatggtctcgatctcctgacctcgtgatccgcccgcctcagcctcccaaagtgctgggattacaggcgtgagccaccgcgcccggccatctcagggatatttaaacaaaggaagaggaaatatagggaagagaaagaaaccacagcttcttttagacttgtctgacaagcctatggcaattttgtcgtccctttgttattttatgtgggagagggaaatgtttcagaaacgaaagatctcatcccctttatttttctgtgtatgcattcactgctgcccagtgtcagaacagttatacaaacgagggcttgaaaacattttgtgaaaacttgcttagtcctgcaacgttctccactctcgaggtgcagaagcatacatctttataaaaaatatggaggcttgagttatgaaacacttttataaggagataaggatgtacatatgtttggacacattgtccacttcagatgcttgtttaaaaaaatgtttcaccatgtgtctttacccaatacacatactttttcttgatgtggatttactttttttttttttttttaagttttcctgggatagggatgatagtgtaattgttcatgcccacagtaatcctgggaatcttagttttttcctatgattgtggtttctcagcttctttacctctcctttgagttaggtccacctcagttttctaaaggtcaaattaaggcccccccaaaaatacagtatgtagctgaattcctttgaaagatcatgataaactcagaagaacaaacatagaaggaatgtcatttttaatctttttaaagagtgtgtgaaaattcactttaactggaattttaacaggcaagccggcatgcatatatgtagggatgtgtgactttcacagttgtcaccatggacttaggcttgattaaaatgctacacatttagagcgttttgtaattccttttttatatttttaagactagattttgagccatgtgatagttttacctcatattaaatatattgtacagaagtaaaaataatcatgtattcactttgaactcctcaaagccttttttatttatttacttatttacttacttggtttaggagcagaggtttaataggcaaaagaaagagaaaagagactagctctcttctgagaagagaggggtgtccaagtgggacttccctcctcagagccttttttttttttttttttttggagacagagttttgctcttgttgctcaggctggagttcagtggcacagtcttggctcactgcaacctctgcctcccgagttcaagcgattcttcttcagcctcccaagtagctgggattacaggcatgcgccaccacgcccagctaattttgtatttttaatagagatggggtttctgcatgttggtcaggctgatctcgaactcctgacaggtgatccacctgcctcggcctcccaaagtgctgggattacaggtgtgagccactgcgcccagcgctcacagccttttagtgaacacttgtatagttttctattgtaggcaaagccattttgtactgcattaattcatgtcattattttgaagacatctcttggtccttttttttttttaattgagatggagtctcgctctgttgcccaggctggagtgcagtggtgagatctcggctcactgcagccgcctccaccttccgggttcaagtgattttcctgcctcagcctcccaagtagctgggactacaggtttgtgccaccacacccagctaatttttgtatttttagtagagatggggtttcaccatgttggccaggatggtcttcatctcttaaccttgtgatctgcctggctcaaccttccaaagtgttgggattacaggcgtggccactacgcctggccctccttgtcctttttatgtcatgtctaagaactcctcaccaggttttctatcgtatttcctcctacaaattttatcttctacattggatctgattcatgttaagttaatttttgtattacagtatgaactttagtttcttttgttgttgcccatgaatttttttaagctccatttcttgaaaagactattctgcctctattgaattgcttttacaccttagcaaaaaattatttaagtatattcatgttggtctatttcttggttctctatgttattccattggtcttcgagcctaaacctatgccaataccactctattttgattactattgctatctactaaattttaaaatagggtaaacttattcctcactctttattctttttaaaaattgatttggggccaggcatggtggctcacgcctgtaatcccaacactttcggaggccaaggtgggcagattacatgaggtcaggagttcaagacctgcctggccaatatgatgaaaactcgtctctatttaaaaaatacaaaacctagccaggcaaggttgcaggcgcctgtagtcccagctactcgggaggctgaggcagaagaattgtttgaacccgggaggtggaagttgcagtgagctgagatggtgccactacactccagcctgggtgacagagtgagaccctgtctcaaaaaataaataaaaaataaaaattgatttggctttcatatcaattgtttcctttggctttgtatatacattttattgcatgtttgtctctatgaaatatgttgctgggattttgatataaattgccttaaatctaaagatcgttttggtgggaattgacatcttgttgagtcttgcagttcatgaatatggtacgtccctctgtttattgaggtcctcgttgatttatttcataagggttttgtaattttcagcttatagattatggacatattttaaaaatctagacagtttcttagagggccattatatgttgtattgagttttaaatttcagtttgcacttgatacttgcaattatagagaaatatataaattagaatttttatatgtattctgtgactttgctgaagtcagtagttccagcaacattttttaatagctttcttaggattttcttcataaatattaatgttattagcaaacatcaaacatcttacttctactttttttttttttttttgacactcttgttctgtcacctaagctggagtacagtggtgcgatcttggctcactgcaacctctgcctctcgggttcaaggaatttttaccctcagcctctcgagtagctgggattactagcacactccactatgcccagctaatatttgtgtattttgtagagatgaggtttcaccatgttgccagacgggtctcaaactcctgagctcaagtgagcctcctgcctcagcctcccaaagtgctggaattataggcatgagccactgctcctggcccaaacatcttatttcacctacccaatctatattacttttatttccttttcttgtgtttattgcactagctagaacttccagtgtgatgttgaatagaaatggtgaaagaggacatacttgcctttttcttgatgtttgggagaaagcattcagtgtagatcgttaaatataatacctgtagacttttatgtacatgttctttagaaagtttcccttctgagttgctgagggcttttattgtgaatgggcatgtaatttgccaaatgcttttcccccttcaattgatatgatcatgtaatttttcttctttagcctgttatgatggatggctttaactgattttagaatgttttgttgtttttttgagaccaagtctcactctttcgccaaggctggagtgcagcagtggagcaatctcagctcactgcaacctccgcctcccaggttcaagcaattctcttgcctcagcctcccaagtagctgggactacaggcgtgcaccaccatgcccagctaatttttgtatttttagtagagatggggtttcaccatgttggccaggctagtctcgaactcccaacctcaagggatccgcccacctcggcctcccaaagtactggaattacaggcatgagctaccatgcctggccgctttttgaatgtaggccagccttgcactcctgggataaaccccaccaggtcatggaatatgattttttttttttttttgagacgaagtctctgtcacccaggctggagtacagtggcacgatctcggctcactgcaacctccacttcccaggttcaagcgattcttctgcttcagcctcccgaatagcttggactactgtcatgtgccaccatgcctggctaattggaatatgatttcttttaattacaacattccatttgctagtattttattgagaaattttgtatctgaaatcatgagtattccatctggccaaatatgtggctggaatttcatcaaaagtggcagaggggttcccagaagggactgtttcaaaaagtcctgagataggacctgttgggattccaaagaaaggagcataaaacaccagggtaatcagttcaaatcattgttcggaggaactttcatacagggttgtgggggctgcagtgtgtccttgtgttggacagcaaacaaaaaaaaaagctctacttgtgtacgtctgcaatgagaagtttgggttatggagagtatatgagggcttaaggaatttggctcagatccagggccagtttctacatgtttagcaacatgtttgatctctcagtgtttcgggcaacaatgtaactgtcagtgcctgggcattccaatccctagcttacgtttaagcctgcaggggaagacatgcacttggtccagggtcacagagctgtcaaggcaccttgcacttctaggccaggacacagaaaggggagttggggaccactacaatgagcaatgttggtcagtagttttatttgtttgttttcactttatctgattttggtgtttgactaatactggcctcccaaaatcaactgggaatttttcctccagtgccaccccctttttatttgcatgacattttgtagaattggtgttgtttctttaagtattcggtagaattttttggtgaaaccatttaagtctggaggtttctcttgtggaaggtttgaattacgtagtcattcaacttaataggtactcaaactatttcatattgggtgggttttgatagattattatttttgaggaattgttccatttcatctaagttttgtaacttaaatttgtggagttatttatttgaagtattcccttattattcccttcatgacagaaggttctatagttgtatcctttgttttattcctaatagtggttatgtgtgtcttctttatctttgttaatcttcttagatgtttataaattttattgactatttcaaagaaccagctttctgtgtcattgattttctatgtgttctgactttgatttctattctgatcattattattttctttttctacttgttttggttgtatattgctgtttgtagattcttgaggtgggagcttagattatcattagagactttattctaacataagcatttagttttataagctaaactcagcactgtttgagctccatcttacattttcctatattgtaattatattttcattcagcttaactatttctcgattccatttaagaaattatctgtgacacatgggttatttagaagtgtgctcttttggccgagcacggtggctcacgcctgtaaccccagcactttgggaggctgaggcgggcagatcatgaggtcaagagatggagaccatcctggccaacatggtgaaaccccatctctactaaaaatacaaaaattagctggcgtggtggcgggctcctgtaatcccaggtactcggaaggctgaggcagaagaatcgcttgaactcgggaggcggagggtgcagtgagctgagatcgcaccactgcactccagcctggcggcagggcaagactctgtctcaaaaaaaaaaagaaaaagaaaagtgtgctctttcatttccaagtatttaaaatactcctgttatcatgttgttatttttagtttcacatttggcctgagcacaagctcgtttaatttcaaaacatttatatttgttgaagtttgttttggggccataaacaaaaagcccataaacaacatgcttgtggagtattccgtaggtacttgtaaaaaggatgtatattctggtgttgtttggtaaaatattctgtgtttatggatcctgttgattaatgatgttattcagactttctatattttcctcattttttgtctaatattttgctaaaagaaggatgttaaagtccccaacagtaattgtggaattttttatttcttctttcagttctatcactttttgcttcatatatttgaatgttctcttgtttggtgtatatgcatttatgattattatatcttcttcatgtattgtccctcttatcattatgaaactttcctctttgtccatgttcattttctgagctctgaagtatactttgtcttacactaatacaaggtataattgctgcatttttaaaagttaatgtttgcatggcttatctttgtccatttcttttattttcaacctgcctacatcattatatttgaagtaaattttatgtagacaacatgtagttgggtcctgctctttttctttttcactttgaaaatctctcttagttggtatattaaaccatttatctttaaggtggctattgatatgttgcactaaatatatcatttttttcctttgcttttcctttttttttttcccccttgagacagagtcttgctctgttgcccaggctccagtacagtggcatgatctcggctcactgcaacctccacttcccgggttcaagcgattctcctacctcagcctcctgagtagctgggattacaggcatgtgccaccacgcctggctaatttttgtatttttttagtagagacggggtttcgccatgttggccgggcaggtctcgaactcctgacctcaggtgatctaccacctcggcctcccaaagtgctgggtttacaggcgtgagccaccatgcctggcctctttttccttttttttctttttttgtttctgtgttggtttggtttttggcatattttattttcttgcctttttttttggatacctgtacaattttaagaattcagttttggtttgtctgtagtgttttttaaatttttaaattttattttaacagcaagctctaacatagtgcttttttaagtgtatttcttggtataattattttagtggttactttatgtattaaaatgtatttatgtaacttaatcacaatctgctggttgtcaacattatagcaatttgagtgatttgtagaaatgttacttttattaggtccctttatactcattattctttttttttttttttttttttgagacggagtctcgctctgtcgccaggctggagtgcagtggtgcagtctcggctcactgcaacctccacctcccagattcaagcgattctcctgcctcagcctttcagtaactgggactacaggcgcttgccaccatgcctagctaatttttgtatttttagtagaaatggggtttcatcacgttggcctgatctcctgacctcgtgatccacccgcctcaacctcccaaagtgctgggattacaggcgtgagccactgcgcccggccccattattcttttaatacaattgtcttgagcatttactctccatgtgctgagcaccatattgaatgatgttataatttctgcttctgttgtcaaacctatttatttaaaatctctagtcctatgtcataatgtcagactttgttgaaaggacaagaatagtctctttgcctgtatttcttaccctttccattgttcttctatcttgaagcctccttctaccattttctttgcatgtggagaacttcctgtagccattttttttagaataagtctacctgtgacaaatattctttgttttcttttatctgagaatatctttatttcttaattcttgaaggaaatttttgtgtggtataggattcatggttgacaagtcttttcttttggaaaacttgaaaaacattgcagcacttccctgtggcctctggttttaaatgagaaatctgcttccatttgaactgttcttcttctttactaatgtgtcatttctctctaactgcttttaaaatgtgtgtctttagttttcagaaatgtgattatgatgtgtcctagtgtggaatttttttatgtttatcctgttgcgtgattgttcggtttttcaagtcttcaggtgtatggcttctgccaaatctgggaaatgtttggcctttatttcttcaaatattttcattcccactcccttccccctttttgcaactcagaaaaactgagtgaggtctttattttaattgttccaaatgtcaggcctctattttaattgtttcaaatgttaggtctctattttacctgttccaaatgtccttgaagcgctcttcttttaagttttgtgaccttgatctgtctttggagagggctgcagggagtggagtgctgacgactctcactgcttgccttgagatggcgctatcctggaagtgaaagtataatgccaactagcattgccttggactgcctccttctgccttgctactggctaggggtgggagtttggctctcctgctgtgcaaagggaaggagcatgtagactttttaaatcaggttgcttaaaagtgggccaaaggggaggtggggcttttaaactggcaacaatcaaatgtcacatatcaaaaatggagtcagaggccaggcacggtggctcacgcctgtaatcccagcactttgggaggccgagcagggaggattgcctcaggccaggagttcaagacaagcgtggccaacatagcgaaaccgtgtctctactaaaaatacaaaaaattagccggtcatggtggcgcatgcctgtaattccagctactcaggaggctgaagcacaagaatcgcttgaaccctggaggcggaggttgcagagagccaagaatgtgccactgcactccagccggggcaacagagtgagactctgtctaaaaaacaacaacaaaaaaaaaaacccataaaacaaaaatggaatcagactgtcatacttttggttggctgaaaaataggaaaaaaaacaaacccagccttatttatagatggattatcttgatgtttggagtaagctaaaaatagattgatacatcacatcctgccttgagtggctgtgatgtggccagggatgtagagaaatcctctccatggcctgaagctggaccagtacaagtgggcgttacctttgtgctgggagaagtgccctgaggtaaagatacatgtgtgcttttgtgggaaatggtttgtctcgttgttcagaagtgctgcagatcagtgacaagtatatatagaacaagggcatgaaattactggagtgggcaaagtgagtggatatttatgtcccacgtcagtgcctataaaaagaaacccactgcagaagaggggaggggaacctagtagttaaggttaaccaggctcagtcctcagccatcccagtccttgcactctagggatataaaatatagtcaccaaggtgttaggggacggagggttttttttgtttgttattgttttttgtttgtttgtttgttttgagacggagtctcactctgtcaccaggctggagtgcagtggcacgatctcagctcactacaacctccacctcccgagttcaagcaattctcctgcctcagcctcctgagtagctgggattataggcgcttgcaaccatgcccagctaatttttgtatttttagtagagacggggtttcaccatgttggccaggatggtctcgatctcttgacctcatgatccacccacctcagcctcccaaaatgctgggattacaggcgtgagccactgcagccagccaggaatggaggttttaaaagggcccaacaacatggcatcctgctgaccacaactaaaatagctccgctccttacctactatttacgaagaccaacactaagacagtatatggtgtaatccctacaagagaacagcctgccccttggtgacatgtttacgtcagacctttttcctcccagacagtgcattgattcttatttaatggcattgctgctttttctggatatgacattaacttccctgccaacagagcctttgctgaaaccattataagggagtgtattgacttcttcatataccaacactggctggtcattaccttaaagatccaatcacaatgtagacacaaatggattagggtttgtagctaacgctgttgatgtcttgttctgtacaacccatcttcctacaagtcttatcaaatgacctctgggaggatgtcagcctgctcactaataaagtttttgttttgttttgttttttgagacagagtctggctctgtcccccaggctgtagggtaggagtgcagtggtgtgatctcggctcactgcagccttcgcctcctgggttcaagtgattctcatgcctcagccttcttagtagctgagattacaggtgtccaccaccacacccggctaatttttgtatttttggtagagacagggtttcaccatgttggccaggctggtctcgaacccttgacctcaattgatccaccctcttcagcctcccaaagtgctgggattacaggtgtgagccactgtgcctggccactaataaagttttattgcgccccctcttccgtctcactgcctcattttcattcctgtgcatcctgagttcatatctcagataaactccctgtactccagtaatcatctcacagtttactgccatagaatatcaaaagtaagaagttctgttttcacattctttctattaatgaacacccaattttcacattctttcccctctcacttctgtagatcgttacttcatactcattttctgaaatgtcttcctctttttgccccattctgtgggactcaaccatgcaaagctctaaacctagattgaacattagtccaacgttttctgagctgacccaggctgtttggaagttctgggaaaaaccttaacccccatttccaccaccccacagacctcttcccatccctcagtgaactaaaatctctggaggatccagtttctcagatgcccagtatttttctggccttgccattgccatttttgggggaaatcacttatccacaccaattaaaggaatgtcagatgaagttttctgttagtcttcctaaattgtggcagccagtgtctccccatgagttgcgtgcaaacccccacatggctctgtacaactttctctttgcaaaattaatatttttagtatataaaatgatatgccagatgtatggttgtctttcctaaatctatacagccatccctatgttttcacttactctaaaggaagttcaaattttgcattgttttcttgcatgttttctttatatatcattccttttttttttttttttggacaggtctaggggaatatctaaggtgtagtcttgaattatctctaagtttaaatattcttctattaatttttttgcctttttttatttttgtggagaatgaggtcttgttatgttgcccaggcaggtcttgaactcctaggctcattctatcctcctgcctctgccctcctaagtgctaggattgcaagcatgagccatcatgttcagtcctattaatttttcttaaaaaagataatgaagtaaactttgcattcagtaatctcctgttaagaatatttttggtgaattttgatgaatacatgattttgtgatcacaaaccaccattaaagctgtgaaatatttccatcacaagaaaatattccttgatatagtcaaactgtctcccaaactccagctataaggcccattcatttaggtttttctctttttgccttttttagaatgtgaagtgaatggaatcatataatatgtggttttcagatattttcacttggcatatgattttgggatttattcattttatttcatattgtttcttatatagagtagtttattttgtggatatgctacaatttgttcatctgttcacctgttcgtgaacaattttccaagtttttggctgtcgtgaataggacgttcatgaatatttgctacagatatttggatggaaacattttaacttgtcttttgtaaataactaagagtagaattggtatatcatatggtatgtttatatttacctatataggaagctgtcaagttgttttccaaaatgactatcattttgcattctcatcaaaaatgtatgagagtccagtgctgcatctttgtcatcacttggtatttattgtcactttgaaacattttactaatttcagcaggtgtgttgcagtattttatttgggttttaagttgcattgctaaaatgactcatgatattgaatatcttttcatgtgttcattgttgatttgtatatctttagttatttgtccaaatcttttttttttttttttttttttgagacagaatcttgctctatctcccaggctagagtgcaatggtgcaatcttagctcactgaaacctctgtctcccaagttcaactgattctcatgcctcggcctcttgagtagctcggattacaggcacgcaccaccacgcccagctggtccaaatcttttttcaatttttaattgcttttttcttcttaacacgaaattacataactttgctttaattttctcctttttaaatgttctatattatagtcatttctcagttatatgttttgcaaattgttttttttttcagtctttgacttgccttttaattttcttagcagtgtttttggaagagtagatgtcttaaattctgatgtaataaaaatattttgtctttatgtttttttgtgtgtgtcctgtctaattagactttgcctactgcaatgttgcaaagctttgacttatgttttcttctaggcattttatatttttagatcttttatgtggtctgagacccttttttttttttttttttaacggaatctcgctctgccacacagactggagtgcaaaatgatacaatcttggctcactgcaacctctgcctcccaggttcaagcgattctcgtacctcagcctcctaagtagctgggactacaggcacatgccactatgcccagctaattttcgtatttttagtagagatggggttttgtcttattggtgaggctggtctccaactcctgacctcaaggtgatccacccacctcggcctcccaaagtgctgggattacaggcgtgagccactgagcccggcctgagttaacgtttatatatgatctgaggtaagggtttcacattaaattaaatgtgttttataacccaacaaatcactctggggacataaccattaggaatgagggctttcttacaccaaaatacatgtacacaaagatttataacaatttcacaataatcaacaactataaataattcaaatgacagtcatctgtaagatatttaagtaaattgtgaaacagtcataaagtggaagaaaacacacagattaaaactgttacttttgtccaacaagatgaatgaattttccaggaaggaatacttgagttggggcttgtggaagccccaacctgtttgtagtttggggttgccatctgcctcacagagcaaagtgaagggtttggatttggggaacacaaaattgtgttctcctatgaaaaacctttctgtaatatagttggccgtggtatttgccaggaatgaaaggtcagggttggagacctcatgagtctgggttttcatttgaggttaagagaaaaggtagtgattataatcagaaaatctagagtgggtgtaattacctccagaactcactactgttagcctgggttttatggtagttatggaagtggattaactactaatgataaaaaatatagtctcctccacctcagaaaatctcgagtggcagtgacacgccaaacacacagtagcaaatacagtagaattttattgatacttttttaaccagacaaacctcataaatggtgattttttaaaaaaacagaataatgttcacatttttgcagcattaactgagagaaggcaaatttgtgcctgagagggaggaaatgttctcttcatttgcagttctaggaattacatgggaaacacatgtaggtagtcttcaagctataaatttaagatttgtttacttaatctataggtttatacatgtatgagaaatgggaaaaaagaataaatgtaatacattaaaaccaatacagtgaatctccacaccctccaatgaaaatatggaacaaaatctcagcatgcccagcatgagtctgccagattgcaaattccatccaacgcttcagaggatgctattatcaagatttcttcatagtttgacactttaaatatgtgtcaataatgatagctattatattatggcctgattttgaaatttatattaatggaatcatgcttgtagagatgttttttcatattaccgggatatatttttctgttatttttaaagatgtttgaaatgaatgtatatctttctaattatcatcctttgttgataacatgtacattaaatgggattgctttaaaattcattgaatctcatgagaatatgtagaaatgacattagttttggtacattgtaaagcaaaacttcaggttgaatatcctatgataatttaaaaccacaaaattatactattaataatagagcttgagcactttaagggaccatagagactcctttaatgtaatggtgagaatacagaggtacagagaagtcaggtgactagccgaagcccacactctaagataaaggccgaccccatctatttttcctaacttgtcagaatactgtaaattatactgcttttaaaagacctatgaaattggtgttggagatgccatcttgcaaataaaatattctcaaattttgattatctttgttttctttatgcatgggttacttagcgttttgtgacttgatatgcaaccacagcttaaaaaatttccagttatcttctatttttgatctgtaccctgattgaattattttatttcattttacacaagtttaaagagatttttaattgtcctagctattctcagttttgtttgtactctgtgctaaaacatgctgcaattggtgtctgttatgttatatggatttatcaggccaaatgtgttcatcatggtatgtgaatccaacagaactgtaccaatgttatgcctgcctttttgatattattactgagataacgaatatcaaagcagactggtttgtttagagatttaaccctttattctcattatactaaaattgttttatgtaatttgaattcatgtttaaaattgtaaagtatgttttcctgttgatattttctcccttatttctatttgtccgatacaaatgtgcatttttttgtgtgtgtttgtgtttaataattacaggtatgtattttctagacctcgatttaatatatttctatgacattataccttagatgtgtaagctatgaactaattattactggatatttttaactcatcaaaaattactgcctacttattcaataatttattccatgttcttttcttgtgatagctaatatatttgggcttaaatgcatcttcttattttgtgcttatcttttcttcagttttgtttcttgtgctttcttttaaaaacatgtatagattattaatattcttaattttccttttagtttggaatgtatatactcattttgttagtctttaagctgaaaattataacacatgtatttaacacatcagggtatagagttattaatacctttaccctcctcttggataatataaggcatgttatcatgtagtggtattgaggcatcgttaattctattgttctactcaacaaggggatattgttcatgttttatacagataatgaataattgtattgatccgcagatgcattccttatatcacgcagatctctcacctggaatcactttttttttgccttaaatataaccttttgggttacctttttaactaaaattttcattttttacctcatatggtcttattttatactgcttcttgaaaaacactattgttgtgaatagaaatctaggtttgcacttatttcttcagtaacttcactgtatccttccactacatccatgagtcactatatactggatgtgagtggagacaatttatattgtgactatagtcttcctgtgctacagaaacaaaatttgatggcggtggtgttttgttttgttttgtttttgtttttgcttttgttttgcttttgagacagagttttgctcttgtcgcccaggctggaatgcaatggcagaatctcggctcactgcaacttccacctcccaggttcaagcgattctcctgcctcagcctcccaagtagctgggattacaggcacccaacaccatgccctgctaatttttgtatttttagtagagacggggtttcaccatgttggccaggctggtcttgaactcctgacctcaagtgatccacccacctcggcctctcaaagtgctgggattacaggcatgagccactgtactcagcggtgatggtggtttttttgtgttttgtttttgtttttggagatggagtttcgttcttattgcccaggctggagtgcaatggtgcgatctccgctcaacgaaacctccgcctcccgggtccaagcaattctcccgcctcagcttcccgactagcttgggttacaggcatatgccaccaggcctggctaattttgtatttctagacacggggtttctccatgttggtcaggctggtcttgaactcccaacctcaggtgatctgcccgcctcggcctcccaaagtgctgggattacaggcgtgagccgccacgcccagctggtgatgttttgatgaggacaggacctgacttatgtctcttagtttcaggcaggaccctctcataatcaagtttgtgattggatctacctgccttgagtgccagaagggagaacgagaggtagagaggcaggtttcggttactgtgaatgaaagatgaataaggaagtgtcctctaaagtcacaaacttgaaacgggatgaattctactctccacttaggtctgagagcaattagtcctgctatttccaaaattagaatcttctttttaaaattttagttttagagacagggtctcgctctgttgctcgggctagagtacagtggcgggatcatagcacatagcagctttgaactcctagactcaagccattctcctgtctcagcctcccgaataactgggactacagtccaaaaatttgaatcttgtggcctgtaataacgagtctcttgagcagcatgcctacctatggttttaggcacactttttctgaactgttgaagaaataacccaaatgtgtgctttcatgtaaaatctttaatcatacctatgaggctagctgctgagttagggtgttattgtattttatgttttgataaatgccaaagatcctgctgaggcttagcctcccacagagtatatttacttcttttcatattttccatgtatctcttttattgattcatatcttgatagcatcatgtgtcttatttcactctatgtgaattgaagatagttttcagtcatctatattgatagttctgtaaatattcagttgtactaaatataagcaccccatatttgtatttattagaccagaattatcaatcttggcatgagaattcactagaactttaacaattttatattgtttctactaattgctgagataatggacataaaaatgctcagcatattcatagatttatgtctttatccttttacaaattgttgctttatgtaatacaagtcagcattatacattacatagagttcaaaatataatttcttggtgatcatttctttctttttttgttttctttctttctttctttctttttttttttgtttttgagatggagtttagctcttgtcgcccaggctggagtgctatggcgtgatctctcggctcactgcaacctccgcctgccgggttcaagcgattctctcacctcagcctcctgagtagctgggactacaggtgcccgccaccacgcccagctaattttgtatttttagtagagacggggtttcaccatgttggccaggctggtcttgaactcctgattcacctgccttgacctgccaaagtgctgggattacaggcatgagccactgcacttggccagtgatcgtttctttaatactgatattttctgatataaattttcattttcatgtgttaattctttgttgtattaaatatatttttcccaaagctgtttcatatagttttctaatattatactctacaagtgtttcttgtacccatactactgttttttgtttttgttctttatgagagacggtcttactgtctctcccaggccggagtgctgtgacaccatcagaactctgtgcagccttggctcaagtcatcatcctggctcagcctcctgagtagctgggattacaggcttgtgccaccacaccctgctattactttttttttttttttttttttttttttggtagagatggggccttgttacgtggctcaggctgatctattaatagaattcctgacctcaagcagttctcttgcttcagcctcccacattgcaggaattataggcatgagcctctgtgcctggccttttggaaatttttaacacatcaaaacttactaagtgctaatttaagaatttattccatactcatttcatgagatagctgatatatttgggtttatatacatcctctggttgtgtgtgtgcttttctttgccttacttattgtgtgtactttattttttgtaatgttttctttacatttacattttctttaaatttgtaagatatatactctgattcagttaatgtttaagctttaaaacagttatttaatacattatagagttaatgtatttgctctcctcaagaaatataagaaacttatatgttagttaatttgcccatatgagtttatatactattgaggatatgcatggtaattccaccattctgtttccagaagtattaatattttattttattttttattttaatttttatttatttatttattttgagatgcagtctcactctgttgcctaggctggagtgcagtggcacagtcttggctcactgcaacctccgcttcccgggttcaagtgattctcctgcctcagccttctgagtagctgggattacaggcgcccaccaccacgcctggctaatttttgtatttttagtagaaacagggtttcaccatgttggacaggctggtctcgaactcctgagctcgtgatccgcctgccttggcctcccaaagtgctgagattacaggcgtgagccaccgcgcccaacagtattaatattttatacagataatgagtggtctcattaatccatagatgcactcctctctcagatcctcatttcttctatcatcacagaccatcacctgggatcactttccttcaaccttaagaaggatcttaaaagtgttattttatgccagttatttttatccattaaatttctcattttgggcttcaaatagtcttatttcagtttttcttagccagtgcatttgtcgtgcatagaaatctgctggcagttatatctgtaactgactccgtatgttattccatgtgttcctgacacctaaatttatattggctttgagtggagacagataatttatattatacatatatataattatgtatgtgtgtatataaactacatgtgtatatatatataaatgctgtgtgtatgtgtgtatatatattttttctcaaagatatgaattatttctatgtcatctcataaaataaaccaggttataaaattttaactacagtgactcttaagtggacagtggagttaaaaattatgaagagcaattagtcttgatagttctgtgttttgaatcatacagcctataagaatgtgtcttctggacgatagacctacctgtagtttatgaaaccctcttgcatgtgatttttttcaattaaatgagtctattgatatattggtgtgcttttgtgcaaaaattataaccattaggggctcccacctgtaatcccagcactttggaagactgaggcagttggatcacctgaggtcaggagttcgagaccagcctgaccaacacggagaaaccccatctctactaaaaatacaaaattagccgggcatggtggcggatgcttgtaatcccagctactcgggaggccgaggcaggagaatcgcttgaacctgggagggagaggttgcagtgagctgagatcgtgccattgcacttaagcctgggcaacaagagtgaaactctgtctcaaaaaaaaattataactattatctatgatgctatttgatgagtgagggaataattgtacttttttctttttttttcaaaatcacactgatcctgaaaaggtggatctttgatttatcttcctaaagcagtgtatgtgagaaccttgtgttgaggaagactgataacagcttgtatgtatttagcacgatgtgccaggcctggtgttaagtactttttacctcacttcccatattcctaatgaggttggttgtagtgtttttcatcttactgatttttttttgtttgtttttgttttgttttgtttttggctaatgactttaaaagacctccagttcttgaacttcagctagggtcccatccccagagtttatcagaaggtataggttgggtccaagaattcacaggttttttaagttcatagtgaagctgatgctgtaaaactacatatcaaattgggaagcaatgaattagaagaggctcatgttttcgtcatgttacatgtaagttcctccttcacttttcgccatgaataaaagttccctgtggcctcaccagaagcagatacgggcaccatgcttcctgtacagccagcagaaaggtagctaattacatctcttttctttatatgttagaaaaattagaaggacattcaatgttttacaaaaaggcccacaaacgaaatacagacaacgttcaatttattaatacgtttcaatccccaaatctgagagaggtgaagcaggtttcccagggcctcagaagcaggattgaagaatgggtcccttgctggcgacttcagtggcgtggcattgtcccaggtggccatggaaatcagggtgcataccctttaaaagcagctgtggcctccgagatatcgttttcccagtcttttctccccctccctgcacgacgcctcttggcagacatccgggagaacccgaaaggcgctcgttgcctggttggatgcagggtacaaactacgttacccagaaatctgtgcccagctcattgttagccggcgtgcagccaatgacagcccagaaactgggcgtttcctgctgctctgggctgcaggggcgagacttctggcgtcgccgtcgtgacgtatttttcctatgcccggtccgtgcattctggttgtgaaggctgagttctagagatcgggtcggctttctacgcggctctcgtggaacctagcaaagaaagacagtgaagactgcaggaccttccttcgcgcttttgttacaatccatgacccctgtcgtgggacgggcggcctctcgcggaggtgtctgccggggctgggctcttaccgaggcctccacacacgtcctcttgtccttgtctcccccagaagcagccgccttagtcttgtgagcgtttttacaccgggtagattgagacttggagtgctacactcagcccgagggcgtccagcgcggtggaggcgtggggtttcggctgagcccacagggcacagactgttcatccgcttctcatggcagcggcggtgctgatggaccgggttcaggtgagtgggggcatccctcaagcgcaccccggcctggttggtgtgtcctgggatgttcgctctcatcgcgcacttcagggtgctcactccgtcgcattatgtggaggggttccgctcccctcatcagtggcataaggtgtggaacggactcgaaggcgcaggggcagttcgtacaaatgcatgcatggagaggagaatgagtttggggagttccgggaactctctgtgcctggtgagaacagggactagggggtcagaggtaggcctggaatggccgcccgaggagctggtcctctcttctgagggtgctgggagtcatgcaaggtttggtacagagaagggaggtcctctgacgcagttcttaaaaggctccctctggctgcagagtgggtagactagggattatagggtagacggggagatcaagatgaagtctactgaaatagtccaggtgagcgttgatggtctgggccagagtggtggcagcagaggttagagaatgtatgggttttgggttttgtatgtattttataaggaaggctgaccagattctctgatgagacatagtgatgatatcctgggattcttcacatgactgtcttcacttgagacagggggcagtgaatggaggtcatttctagtttagtgtcctgaatccaggccatgagttgtatggagttatgtggagaagtccccacctggcgaccaatgggatgagtactgcaaaagtatatcagacctaggaacaggtacgctcaaatgcttgtaggattgagtttggagcgctcagggaatctcaggtcttaattacctttgttggaaacaggtatcagaggaaggagttaggcaggaatggctggccgaggtgtcttgagtgtggtaaaagtcgtgggagatttggagcagaggagggagatgatctgactcagattttaacatgctctctctggctttcaggttgagaacagactgtgagcatgagggagcagctactgcagtagtgttgatggtgtctggtctagaggtgtggctgtggaggtgagagaagttggtaaattttctgttttttaaagtagggtgattggattttttgatgcgaaaggtgaaagagaggagagtcgtggatgaccctaaggttggtttgtttttgctgtagctggtaaaattatgaaaatgccatcaactgagatagagaagttggcagcaggtatgatttttagtggttatatcaggagttaggctttggtcatgtttaggttaagaggtctcagttgtcatcttagttgaggcctcaggaaaacacacaggtttttagttctggggaagggttctgttgaagaagttgaaaaaaatggtggccagtgtgtggagtgggatggggtatcttcaaatcatggtggtaatgctgttattcagtaagaaagttgaaactggacactgagagaaaactgggtctgttgcttaggcacctggacggcagtggtggatagtgtgaagacgcgagcgcttcctggacactgcttgcagagtggcatgggggatgagggatgtcatggaggtgcatatggcatgggccagtggcggtggggatctcagatgtgaggaaggtgtagtccaaagagtaatgagcacgttgggaggagtgtgaactgatgcccttaagactctagtattggcagctcatgggagaagatggagctgaagtttggttgtgtttagaggcatcgtctggacaacaccaggagaactggttggtaggcgagtatttgggacccttcatgccagacccagagttgagacagcatctgtctgcacacttgcctggttctgctctgggctggacacagtggtgagagggacatgaggagagagcagacactagtggtgccaaggtctgttatctcctcttagttgggaggctggggaggcgagggactagagagtgggtgtgtgagtgtgtagactggggaggagggggttctggggagagatgctgactgtggactcagctgtacttatcatggcagagttgtgtgaccttcgaggatgtgttcgtgtacttctctcgggaggagtgggaactccttgaggaggcacagagattcctgtaccgtgatgtgatgctggagaactttgcacttgtggctacactaggtaagtctgtgttttagttatctaatgctacatggcaaattatcccaaagcttagtaactgcaaacaataaaaatcaattatctctccagtttcagtgcattggtaatctggttagagcattttttgttgtttattattttgagggttttttttttgttttttgttttttgttttttcagagagtcttactctgtcacccaggctacagtgcagtgttgtgatcatggttcactgcagcctcaaattcttgggctcaagtgatcccccccacctcaccctcctgagtagctgggactataggtgcatgccaccacgcccggctattttactttttgtagagataaggtcttgctacgttgcccaggctggtctagagctcctgacctcaagcgatccttcctccttggcctcccaaagtgctgggattacaggcttgagccagtgtgcccagcctgatcacaccttcttatgcaggtgcttttggctctcatgaagttttaatcaagctctcagccagtgttgtggtcttacctgagaagaatccacttacaagctcactcacattgctttttgcaagatttagtttcttgtggcttgttggactgtgagcactgttccttgctggctgttggccaaagtcctccctcaggtggcctgtctgtattgtaccttatgacacagaagctaacttctctttgagcaagtgaccaaaagaatgttcaagatggaagcccaggattgtaacctaatcttgaaagtgtcatttcattatttttgccatattctattccttggaaataagtaagtccatccagcttacaatcaagtgaggaggcttacacaggggcaagagtaccaagaggtagggatcactgggaccatctcagaggctgtgttccacaggcctttacacccactccggtgtccttggtggggtttgagtcttcttctcttccccatgggccactctttctgtccatccagatccatgactcttctccttcccttctttgtttcccagagtaggtgctgtgggttctagggctggctgtgttcagtgtttctgccttcactgggtaatctgaacatctgttgccctagagctttgcaggaaaaggttaggattcgggagtttttcagtctgctaagcagattctacacagctcaggtgcccactgcctgagtccgtgtcatgatctttgcacctctttgtcctagattctgccctcatcctctggctgacatttcctggggcctgactgtgccaggaatttcaggggctgacacagtcacttcttgtggtgattacagggctgtcctggtacatccgccttggagagtattttttctaaacattctattttctctgtggagtgggtctacctgcgccactcacctgccctttgtttgcgttacagctttcattttcccagtcccatgcagttgcgcagttggagggggcagaaaaccttgggtgcctgacagggcagacatcactgcagccacagtaaaggagacctacagagggcatggccctgctgaatgggagctggaagagggtatctgttatggttgggttcaaatcgaaccttcaacttgttttgtgtttgtcagtgttttgttgccaaggcccatagtgattcttcacatctactttactttcctcattcttggcactttttccatttgtcatttctcacgtgtcttccatcctttgggtgttttcccacttttctggcctccgtgtttcaattgctctcttcaacactagcttactttaatgtgtcatgagttctgcacattaaatagtccgtgagaatgagctacttatttggagtcagattttcgtgggcatggacatacccatctgcacagagctcacctgacaccagcggccaaggccctgctgaaactctcttgcagaggaatcaggtagaggcttcacctatactccctatactctatgccattgtttttaggtctttacctcatagtcagggttcctccattctgtgaggccctatactgacaaccagcccttctttacactgatcctggccctcttgtcctgccaacaagccagtggactcgcactggtgttagacacacatttgtgatggggctgctgcctcccaccaaagtcagcatgcacttcaccagctcttttttgctttcaggtttttggtgtgaagcagaacatgaggcaccttctgagcagagcgtttctgtagaaggagtgtcacaggtcaggactgctgagtcaggtcttttccagaaagcacacccatgtgagatgtgtgacccactcttgaaagacattttgcacctggctgaacaccagggatcacaccttacacagaaactgtgcacacgtgggctgtgtaggagaagattctcgttcagtgcaaacttttaccagcaccagaagcaacataatggagagaattgcttcagaggggatgatggaggggcctcatttgtgaagagctgtacagtccacatgttagggagatcctttacgtgcagggaggaagggatggacttaccagatagctctggccttttccagcaccagaccacttacaatagggtgagtccatgcagaaggactgaatgcatggagtctttcccacacagctccagtctcaggcaacaccaaggagactatgatggacagatgcttttcagttgcggtgatgaagggaaagccttcctggacacctttactcttcttgacagccagatgactcatgctgaggtgagacccttcagatgcctaccatgtggaaatgtgttcaaggagaaatcagctcttattaatcacagaaaaatccacagtggagaaatatctcatgtgtgtaaggagtgtggaaaagccttcattcacttgcaccacctaaaaatgcaccagaaatttcacactggaaaaagacactatacatgcagtgaatgtgggaaggccttcagccgcaaggacacacttgttcagcatcagagagttcacactggagaaagatcttatgactgcagtgaatgtggaaaagcctacagcagaagctcccaccttgttcagcaccagagaattcacacaggagaaaggccttataagtgcaacaaatgtgggaaagcctttagccgtaaagacacacttgttcagcaccagagatttcatactggagaaaggccttatgagtgcagtgaatgtggaaaattctttagccaaagctcccaccttattgagcactggagaattcataccggggcaaggccctatgaatgcatagaatgtggaaaattctttagccataactctagcctcattaaacatcggagagtccacacaggagcaagatcctacgtgtgcagcaaatgtgggaaggcctttggctgcaaagacacacttgttcagcaccagataattcacactggagcaaggccttatgagtgcagtgaatgtgggaaggccttcagccgtaaagacacacttgtgcaacaccaaaaaatccacactggagaaaggccttatgagtgtggtgaatgtggtaaattcttcagccatagctccaaccttattgtacaccagagaattcacactggagcaaagccttatgagtgcaatgaatgtgggaaatgctttagccacaactccagcctcattttgcaccagagagttcacacaggagcaaggccttatgtgtgcagtgaatgtgggaaggcttacattagtagctcccaccttgttcaacacaagaaagttcacactggagcaagaccttatgagtgcagtgaatgtgggaaattctttagccgcaactctggcctcattctgcaccagagggttcacactggagaaaagccttacgtatgcagcgaatgtgggaaagcctatagcagaagctcccatcttgttcgtcaccagaaagctcacactggagaaagagctcacgagtgcaacagttttggtggccctttagctgcatctcttaaacttgtttaacaccagaaaattcacacaagagaaaggccttatgaatgcagaaaatatgtcatcttgttcatcctcataggactcacaccagagcaatgctctgtgagtaccctttgtgagggaaccatcagctagcagatgagcaccgtatattcattccaccctggggagattcctgataagcaccacatatgtgggaggctttcatgaggtgtgttgcactttgtaactgtctagagctcttgatggaattatatcactgccagtgcctgtggcggaagccatcttattgctaccagctgtgtgtgtcaatcactccattttgctcagggaaggcagacttctgtgctttctttcctgttccctacaggtaatcatgaatattttcaaggacttccccccccccccacttcaccccctaccattgagggtcctcatcttttccctcatgattaggttctgagcaaacatgatctagctctcaccaaaaggacctgagctagggtctgctgggatttcctgacacgattttccatcttcatggacaatgttaactgtaaacgtgatagctgtgacttacttgtcttactgccaaatcgcccaaatttggaactgcttgtcccatgctgctctgatttatacagtgataagggcctattgtggcagtctttactcttggggattttgttactgtgtagagtggattgagaaaagaattgggttctgtcatgaagggagtagcaccttttgtgggcaccacctttatgtgcctcagaggggaccaaaggatggcagaaaactgttctcagtctagtttgacctaatttacactattgccctaggcttgctaggaaagactgaaaaaatttttgtgcctaactttgtggcctggctgccaggatttcctgtgagcccagtgaggagggcatagttggtgcgaaaatctcctgtgcttgtggaagcaacataagttgggtcccttaactgtcacgtactccccagcactgttgagggattgctgtcttctgtacctgtacaggatcaagtccctgatatccagaaccccataggcaagtaacattgactgtaagacctctgtagggcaatgtgaaaatcatgattgctacagaagcactgagataatggagtggggatgactgtggcaaacaaaaggagattcgaacattctagaggggcatccacaagtctcggtgcagttatgatggtgtgggatgggagtgcatagaaattctcaggaccttcagacatctgtatctcctgtggccaaggccactgtcagaggaaataatctaaatgtttgtggattcctgtgtctccctgggcagttgacctgcacagacaggaacctcagcagtgacagaagagagatccagggatgggtcttctctgacccagccagcattccgagtgactgaggtggatgtggacatcattgcttaccaatttttaccaacattgaggcagggctcactctcctaaattgtagggagaggaatatggtaaagccaaaatagttgacagatctaactttcctagtggaacagtatatatagattttaatgaggaacatttatttaatagctttatggaggtatgattaacatgcaataaactgcaaatatgtaaagtgtaaaatgtgctgtttcagcatgtgtgtacacctatgaaaccaccacagtcaagatatccaacacaacaaaagattgtccctttataatcctcaatttttccttatcttgttttccacaattcacaagcaacagcaagcattttctataattttataaatgaaaccatatggtgtgtactttttagggggtggggctctggctttttcagtaaacataactattttaaggttaatccattatcttgttgcatgaatcaattgtttgctcatttgtattgctgcgtagtatttcagtatttcattgtataccacaatttttcttctttgtcaacttaattgttatggatgtttgggtaactttcagtttttggctattacaaataaacctctgaagatttgtgtgcaaattatggctgaatgatattccattctataaatacacctcagtttctttatccatttacttattgaaggacggttgctttcaagttttggcagttatgaataaacctactacatatttgtatagtttttctgtggagatgttttcaactcatttggatatgtgccaaggagtgcaattttctctgtcatatagcatgtttagtcttgtaagaaactgccaagctgtcttccaaagcggctgcaccatttattttatttatatatattttttgagacagagtctccactctgtcacccaggctggagtgcagtggtatgatcttggttcactgcaacctccacctattttagtagacatgggtttttaccatgttggccaggctggtctcaaactcctgacctcaagtgatcaccctcctcggcctcccaaagtgctgggataacgggggtgagccactgcaacgggctgtggctgtaccatttttgcatccaactaacaatgattgaacattcctcttgcatctcatcctaatcagcatttggcattttcagtattttggattttaaaatgccattcaaataggtgtgtagtggtatgccattgttgcttttatttgcaattccctaataacacacaataagtatcttttttaaaggcagggttgttttgttttgttttgaaatggagtcttgctctgttgcccaggctggagtacagtggcatgatttcggctcactgcaacctccacctcccgggttcaagcgattctcccaccttagccttccaagcagctgggactacaggcacccgccaccatgcccagctaatttttgtatttttagcagaaatggggtttcgccatgttggccaggctggtctcgaactcctgacctcaggtgatctgtctgcctcggcctcccaaggtgctgggattacaggtgtgagtcactgcgcccagcctggctggggtttttttatgtgagtttcacacacctctgagtaagtggcttgcagacagagaagttaacaactttggctgttagcttgaacctgtgatttatgaataccaaaaagacaaatacagaatctaaggaaacacataacagtcctgtatacacacagcagctggcagccctattcccggtgtgtcccatatacctaccattgacctgaaacccagtttgtacgtgctcattgaacattttgtagagcagtaaatacacatcatcacacagattgcctactcatttttatttttatttttcgagacggagtcttgcactgtcacccaggctggagtgcagtggcgcgatctctgctcactgcaacttccacctcctgggttcaagcgattctcctgcctcagcctcccaagtagcttggattacaggcacccgccaccatgcccagataatttttgtatttttagtagagacagggtttcactatgttggccaggctggtcttgagctcctgacctcgtgatccgcccacctcggcctcccaaattgctgggattgcaggcgtgagccaccgcacccggccttcatttttattttttgacaagtgtttccatttgttatctctatccctccaaacagttaataagcgatgttttcaagtatgaaataagaaatacatataggagacagaagcataatgtgtccaggttccagcacagccagtctcaacttcattctttgacttctcagactcttgctcaaactctactgtaaccttgctttttccccccttcacatgtcacagagagatttctgtaggactatttctgccactagttttgaaataacataatcactgttagtccaaactgcaccatcctgtaagccccctgccatctcacagaccttggtcagagtgaagcattccacggagtgagggccttgagaaacatcctgcccaactgcctgactttcttatcacatcgttctgggaaaagatccaaggaaggtcactatcacatcctgccggataaaaggccaaactgcctcaggaacatcttacgcacatcctttggccgggtgctgtggctcacgcctgtaatcccagcaatttgggaggccgaggcgggcggatcacctgaggtcaggaattccagactggcctgaccaacatggtgaaaccctgtccctactaaaaatacaaaaaaattagccgggcgtggtggcacgcgcctgtaaagccaactactcgggaggcggagttcaagaatcgcttgaactccgggaggcggaggttgcagtgggccgagatcacgccattgcactcaaggctgggcgacaagagcgagactcctccaaaaacaaaaaaaaacccaccatcctcctgggcagcaagtcataccctcccgccgcgccccctgccccccacccctgacccctctcatccaggcctataattgccccagcctgtaagcagtgaggggttctggcactaagctagttctccccatcacaggtctcgtgctggacataaaacctgcattgctgtagagctgccaactctgcctttctttaaccctcgccttcccttcaaaacctaacagttattattaatagatttctgtaattttcatttcacaagtattttcacagataatttcaactccctgtaaaatgataactcacttctcaggaaggagataagatcatgaaagttcacagtttttattggggataatacgttccctgtgtacatatactccaactatggaatggcacaaaatgtcctgtcaggaaatggcatgtatcagtcactctcattttcagacaggattgagacttttaaaataaatgtaaaatatttcagacatgaagtaataagtattattagaataaaagcattgcactcttggtaggaacacaatcactgactctacagacagtaatgatgttttcttctggatccagaggcacagcgtcaccctttcaatctacgtcggtatctcctgtcttcttttgtgcaaattcccagccatgtagtctttctttgttctcttggaccaaccatattgaagcttaataaatagaagtcaaagtttaactgtatgtgtatttgaaaagcaacatatggctgagaggcatgagtagagacagagtgcctttgtggtatagtgtgtccctttggcggtgtagccgttgagaacttgctgtgcttcacaatccgatatcataggtccctcacatttctgtgagtatcctagaccttacttcaagaaaatctggttatgtcgcctttaagagcaacccaagccccgtcctgtccgtggagtccggcactctgtttaccagctcccctgacggtgccactgagcctctatccgccatataaggactgaccaacgctctaaggcaagtccagaagcggtgtcgaaacttcataacccagaagacactgcggttctcggcagcgcgactgacccaatgaatgtgcaggaaggaacctttgcgtgcgtgcgtgcgtgcgtgcgtccgtcctcgtgctcgcgcatcgtaggagggcgggacttccggcgtcctcttgccgtggttgatttgattttctctggtgttttcactagttccggcctttggcgctctatgacgtcaccgaagtgacggagcggaaaagcgcgagaagcggcttggttccttgtacgcagaggcggtagtgacacaggcacaactgacagtggcagaagctcagctgacaaggactggggacggcggtgtccttgtcttgcctttgtcgcccccgcccctctcttccctggctggacttgcggagtccccgccgaagaacccgaggtgggtgccccgtcccaggcccccccccacctccgcccgacccctccttccagtgctgaagcccatagaaggggccctgcaggtcaggccccttgtctcgaagagaggggcgttcctgtgtggggtccccgtatcagctggtttgatgcagcctcagagctcccttcggggatctcaggttcagagcatggaggtgctgccaagtgggccgcgtcggggagcccggagtgtgggttgtttctgcgggaaagagagggttttgtgaattttctcttggaatggcagcctgagcagccggtataaccatggaaggttgtcaagggaagaccagtgggaggggcaggtccagagttagaacgagcaggatggggaattgacacagagagacccagaagaggccactgcagtggatcccagaggctgcaccagagccgtggtataagagggacaatgtgatgggattctggatagacctggaagatagagccaacaggttttcctgccgtatcagatatgtctgtgagcaaaaatagggagtgaagggtcatttttttttttttgcccgaacatctgaaagaatgaagttggggaagtcagcagcatgagaagtaggtttcatggagaagatcatgggttggagtttggccagtgtgattctcaggcgtctcaagttgaaaatgtcacatgggtagggggacagaaaggtgtggagtctacagaggagaactggtgtagattcttcaaaagaatagagggtggccgggcgtggtggctcacgccggtaatcccagcactttgggaggccaaggcgagcggatcacaaggtcaggcgttcaagaccagcctgaccaacatggtgaaaccccgtctttagtaaaaatacaaaaattagccgggggtggtgacgcgcgcctgtaatcccagctattcgggaggctgaggcaggagaattgcctgaacccaggaggtggagattgcagtgagccaagatcgcgccattgcactccagcctgggcgacagagcgagattccgtgtcaaaaaaaggtgcggagcgcgggtctcttccgcggaaactgacattgcgtttccgttgtcggcctcccgctgcaggagccatatattgaagaccatgtctggaagcttctactttgtaattgttggtcaccatgataatccagtttttgaaatggagtttttgccagctgggaaggcagaatccaaagacgaccatcgtcatctgaaccagttcatagctcatgctgctctcgacctcgtagatgagaacatgtggctgtcgaacaacatgtacttgaaaactgtggacaagttcaacgagtggtttgtgtcagcatttgtcaccgcggggcatatgaggtttattatgcttcatgacataagacaagaagatggaataaagaacttctttactgatgtttatgatttatatataaaattttcaatgaatccattttatgaacccaattctcctattcgatcaagtgcatttgacagaaaagttcagtttcttgggaagaaacaccttttaagctgaatggagaaaattccaaaataaattatatcaccacaatggtgtatactcaggaatgtgtacattgtaaattacttgattaaatagcctggaaatcttttgtgtattctcagcttatctaaacttaatgaaatttcttttatatttaaaaatagtacattctgtctcatgtcacatatcagtagatcaattagtatttccttgtgaacaatgttatttataaagaactcattatcaataataattaatttctttcttttttttttttttttgagacggagttttgctcttgttgcccaggctggagtgcagtggcacagtctcgtctcactgcaccctccgcctcccaggttcaagcaattctgcctcagcctcccgagtagctgggattacaggctcccaccaccatgcctgcctaattttttttgtatttttagtagagacggagtttcgccatgttggtcaggctggtcttgaactcctgacctcgtgatctgcctgcctcggcctcccaaagtgctgggattacaggcatgagccaccactcccggccatgaaatatttttacttaaaaattgggaataagctttctttttctttctttctttcttttttttttttcttttgagatggagtctggctcctgttgtgcaggggctggagtgcagtggcacgatcttggctcactgcaacctccacctcccgggttcaagcaattctccttcttcagcctcccaagtagctaggattacaggcatgcaccaccacgcctggctaatttttgtatttttagtaaagacgggatttcaccatattggtcaggctggtcttgaactcctgacctcgtgatccgctcgcctcggcctcccaaagtgctgggattacaggtgtgagccactgcgcctggccatgaaatattttttacttaaaaattgggaataagcttttttgtgtgtgtgtgtatgtttttgtttttttgtttttgagatggagtcttgctcctgtcatgcaggctggagtgcagtggcacgatcttggctcactgcagcctctgcctcccgggttcaagcagttctccttccgcctccagagtagctgggattacaggcatacgcctggctaatttttgtatttttagtagagacagggtttcgccattttggccaggctggtcttgaactcctgacctcaggttatctgcctgcctcggcctcccggagtgctgggattacaggtgtgagccactgcgcctggctgggaataagctttcgacttgcccaattcagataaattgttttttttttttttttttttgacgtggagttttgctctgtcgtccaggctggagtgcagtggcgcttggctcactgcaacctctgcctcctgacttcaagcgattctcctgcctcagcctcccaaagtgctgggattacaggtgtgagccaccatacccggcccagataggttgatcttataacaatccagaaacaaatgtcatagtcaagatttggtagatagatttaaaactaaaatattctgccattggaagtgaaatgtcatagcacatacgtggacgttatgcatttagagatgttataaaaatgtattggcagtatacatagcactactcaagaagccaaagaaacacttgtgcagtgctaagtgtcacatgtctgcttctgccagaggctaggaatagtgatcttgctataatgtgagaacctgaatcatgtttgtaaaataggaggctgggagcagttccaggccacagtgaagtgtgttgcttctgtcactttatattcttatatttcctttccctcagacaatcaactgttgatgcctgtacttgtgaaaagttgtaaggcaatttttagggttgttgtcaaagaaaagcttggattacattaacatttgtactcagccttttaggcaatacaccagagggggctgggaattgtctgtttgttcctatgataagtagatcttactgtaaaatagtaaatgtccattgaaaagcaagtaacacaacctgtgctaactgggagcacttgaacaattttgttccattctgaataacttttcagcaagtaattctaagctttgtcttatatccttgtgtaaaattgctaccttcatttttaccctatttgatttcttaaatggtttgttcaagaaaaaaaaaaaaaaaaaaaagaatagagggtgtagattggaccgggtcctgaggatccaatttggtagggaagtctaaaggtcattgcctgcaagctatgtggtgagggaggagagagctgatacttggggttcacaccataggtggagccataagccagatgcttactttagaaaggcgcagacctgccataggaaggattttgtcctctgcctagaaaaagggaggcgtgggtgggataaggaatgggcttgggatggagactaaggtttgagatggtttatattctgcacctacaggcttggctgaccctcagggccactctttgtgggaaaagaaaaaagttatccaggctagtggagcagctgggttctaaactagggcactgctttttccccttctccacatatcaaggcaagattggatgatctactgccccagtcaaggtctgccagcaagctcccctcagagccttatgtaacaggcaggcctggttgcagaggaccagtagctgacctacctgctcagcccttccctacaactcattaagaatatatgaaacacttattggtataagcactaaccagtgtccttctaaatgtgtacacataggcagttagaagtgaagctattcattgagttaaattcctgcaaacactacataattgatttgacccaaatttgcctataattatcaacataccatggaaaattttagtatcctctaaaattttaaaagctaaaaatatacacctcagtttttgaaattctactacatcatttatactgaaaacatatagtaaaccattaatccaagaacagtaatagctgatatatatgatgagcaacgagtgtttgacaccggtaagagtcctatgaggtgggagccattcttacaacctatttacagatgagagcactgaagctccagcaggttcagttcttttctagagtcacagtgctgctaagagccaacagtgaagtcggaggagctgagtttatacaatcaacttgagatcagtttgctttagggtaaggaagaagagatggtggtccaactctgcctgtaagatcttcccatcgttgcccatttctcacggtttccctcttccttcagggtcccctggcgatggcagaaatgaaccctgcacaggtgagtggagtgttttctacctttcacctaccagttatctcatagatggttttggcacctccatgtaaagaaaagtggtgtccagagactctctttctgtctttctccctctcttatgtctgaaaagtgagtgattccaccagttctagtatcttaaattaggtctgggatttttgtttgattgttttaagtttactgtgacaccttacctggatggccctggattatgtggagtggctcccatttttgacagttgacgtggtaacatctgtcagagtgtcatgggcacaagattaagaatgtttcagtgtttagaggagagactgaactggatttttagggaactgcaagtgtctgttatatcggataggaatagggagcagagtgggaggtggctagagacacacaaacatcaggcctggaatgacagcctaggtcctgggtctctaatctaagggaggtggtagatggggaagatttgaagcagaagagggcagtgataggaccctagcttaaggaactttctttggcgtctgagtggaggacagactgtggaggtgagggtaatggcagggagatctgagaggatgttcctgcagcagtctaggtggatgttggtggtgacttgtcaagagtagcggtggcttcaggatgtgttttgaactggagctgcccacattttatgatgtagagagtgaggcagctgggggggtgggatagaaggggaatcaggagtggccccatggtttttgtttggaagcatagatgctccatcagctaagatgggagaagtcagcagtattaggaattttcagagtgagtgtgaggagtcagtgtttgttcaagccacagatgtctcagagactcctggtggaggagttcaggttggagacgtccacactatggtggctgtcgtatggaccaggatgaagccatggattcagtttaggtgacagcatctctaggttatggtggcagtgctgttcgaagacagagaattggaatggggcatgagaactgggtctcttactgggtagctgtgcagtggtggaggagtcactagacaaatgagggaatggagtgtttgtggggatgagtgtatgtgagatggtggggtataggagtgagaaagacttctgaaggagagtggacatgatggggttgctgaggagggtaatagggtgaggtcggagagttgctaagcatcagttggaatgagatgaggatgggaattctattagtctgttttcatattgctacaaagaactacctgagactgggtactttatgaagaaaagaagtttaattgactcacagttcttttttttttttttttttttttttgagatgtggcccaggctggagtgcagtggcacaatctcggctcactgcaatctctccctgccaggttcaagcgattcttctgcctcagcctcctgaatagctgggacgacagactcaccccactacgcccagctaatttttgtatttttagtagagatgggctttcaccatgttggccaggatggtcttgatctcctgacctcgtgatccatcctcctcagcctcccaaagtgttgggattacaggcgtgagccaccgcacccagcccatagttcttcaggcttaacaggaagcataactcggaggcctcaggaaacttacaatcctgtgtccatgaggcaggacacagctgagagtatgtgaagtcctcacatggtttgggcacctgacagtgaagtgagaaacagggccatgtagggaaccttcaacccagggcttagggctgcccccggtgctagggaactttggtgttctggggcaggactgggagtgaattggatgctgagcgtatttgccgtgcaccacctggtttctgtgtgcagagtggcctgttaggaggtgaaggaaatgcctgtggtgtgggctgggaggtgtctgtggaattgactggagtggaggtgtgagagatgggattggagtgctgtccaaagagtgatgtgcaggcaggaggagtgtgaatggagggcctcaggccctggccctggtagctcaagggaggaggatgagtctgagtttggttgtcttgggaggcaagatctgggtgactccatggaaactggctggcaggagaggatggatccccccacgggaggcccacattccttttctaccttatcttccatctgtttcctctgtgtgctggacacggtggccaatgtcaatatggagagaaaagtcactcatgccacctggatgtggtttctcttccacattgggagggtgtagagattgaggaaggaaaggaggtgtaggggagagggatgagttcctggagagagaaaagtagcagtgattgtacccattggggttttttgtttttttttttttagatggagtcttgctgtgttgtcacccaggctggagtgcagtggcatgatcttggctcactgcaacctgcacctcctggattcaagcagttctgcctcaatctcccaagtagctaggactacaggcatgtgccgccatgcccacctaatttttgtatttttagtagagatgggatttcactgtgttggccaggctggtcttgaactcctgacctcaggtgatctgcccgcctcagcctcccaaagtgctgggattataggcatgagccactgtgcctggcccccatggagttttaatttatggatgtgagtgagtgatgccagggacaggccaatgacactgaaagaagatatttattccttacgtttccctaaggaggttacataccacataacacagggccacacggtgaaacaccagatttgatcaggaggaaaattggagtgagtttagtttagtccacagatgctgttggggtttccaagggaaacaaggcagggctggctgtcaggatagtttggctagttttagtaattccaggacacctgggctattgggactgtccctagttgtgcagtacctgtccctgggttgatttagagcatgggaaatactgacttggtttgagaaagttagagatggagatggttaagaatatgtgcccaggatggtaggggagatggaaacacatttagctgttagtttgtccctgtgtttaatgggtggtaaatataagtagaaaataaatagagaacttaagtaaatacagtttgaaaagctgctcatgtattcatctttcccaatttggcagggtcatgtggtttttgaagacgtggccatatatttctcccaggaggagtgggggcatctcgatgaggctcagagattgctgtaccgtgatgtgatgctggagaatttggcccttttgtcctcactaggtaaggccctcacacttgcccagtgtcctgggttgggctgtgttgtctccttttacctgaaggcagctctgcgtttcccacagtgagaccatgggtgctgcttcttttccttgtttcctgacatatgttccatgagagtcaggactgcaatatgtgctgtgtgcttcctttttcctggcagccccatcctctgctgttctgaggcttgcaagaaagggctcaggatccagaaatgttgaaggtgacatagagacccactggccctgtgttctattcaaatgcatgagacctctgtgctctgttgttcccttgctcttgccaatatttcttggtcccttcttgttcctggaatttctggcactgacctgatcactaatttggtgaaccactggcttgattgtgtaggatgtagaaatcttctgtgaagttctggtgattatcgaatgtgagatatcatcaggtgatctctctgggaatgtgctgtcttgtctctttctgtgtctttcccctaggactggtctctttcaggtctcacagactgtcaccttaagcaatggggagggccctggtacccaagagggtggatattactccctgaagggctgtagagactcagagggacatgatcctggttcctgggagttgggaaaaggtgtaatatcacagctggggtcatattactaggaatctgtctggtgacccctgttgtttagttgaagactggttgccacaactcactcttcttttccttcccccgttgtcatttttactctgacttctaatccctggcttccagccgttacctattttcttcaactgctccctctgcagtgccatccactgcatgacctgtacttaaggtgaggtctgcatgtatttgtcagtagtccctgaacaccatctcctctgtcacaatcagatctctctgggtttagacacagccttctacacactgctcactagtcaccagcagccatggcctgtggaaagccatttgcagagaagtgacttggagaccctcctcctctctgcactgtacccctctcttgtgttcttacccatcatcagggctctcccattatgggtatttgccaggtccaactctgcacagcaggccttcttctcattggccttagtgtttgtattacttcattctcactctgctattaggaaatacccaagactgggtaatttctaaaggaaagaggttaattgactcacaggtccccattgctggggaggcctcaggaaacttacagtcatggcggaaggcaaaggagaactaggcatcttcttcacagggcggcaagacaaatgagtccaagcagggaaaatgccagacacataaaaccagcaaatttcatgagaatttactcagtttcatgagaacggcatgggggaaactgttcccatgattcagttctgtccacctggtcccacccttgacacgtggggattatggggattacaattcaagatgagatttgggtggggacagagagcctaaccatattattccaccccggccccccccacccaattttatgtcccttccacatttcaacaccaatcatgccttcctaacagtcctccaaactcttaattcactctagcattaacccaaaagtccaagtccaaagtctcatctgagatgaggcaagtcccttctgcctatgagcctgtaaaatcaaaagcaagttagttacttctaagatataatggggatagaggcactggataaatgtacctattcctaatggaagaaatgggccaaaacaaagcctacaggccccatgcaagtccaaaacccagcgaggcagtcattaaatcttaatgctctgaaatgatatcctctgactccatctctcacatccagggcacagtgatgcaataggtgggctcccactgtcttgggcaactctgcccctgtggctttgcagggtacagaccccccctcagctgctttcatgggctggcattgagtgtctctggctttttcaggcacacgttgcaagctgttggtggatctaccattctggggactggaggacgtggccttcttctcatagctccactaggtagtaccccagtagggagtctgtgtgggggctccgaccccacatttcccttcctgcagtgccctagcagaggttctccgtgagttccacccctgcagcaaacctctgcctggacatcaggcatttccatacctcctctgaaatctaggtggaggttccctcccaaatatcagttcatgacttctttgcacccacaggcccaacaccatgtgcaagccaccaaggcttggggcttaaactctgaagcaatggctggagctgtaccttgccccttttagccatggctggagttgaagcagctgggatgcagggcgccatgtcccgaggctgcatagagcagggggacccagggccagcagctgggatgcagggctccatgtcctgaggctgcactgaacagcctgggccaggcccacaaaaccatttttccctcctaggcctctgggcctgtgatgggaggggctgccgggaaggtctctgacaggcactggagacattttccccatcaccttcgtggttaacattccactcctcgttacttatgcaaatttctgcagcagccttgaatttctccccagaaaacgggtttttcttttctattgcatagccaggctgcaaattttccaaacttttctgccttgcttcctcttgaacactttagcacttagacatttcttctgccagataccctaaatcatctctctcaagttcaaagttccacagatatgtagggcaggggcaagaagctgccattctctttgctaaagcatagcaagagtcacctttactccagtccccaacaagttcctcatctccatctaagaccaccacagcctgggcttcatggcccatattgctaaatcagcattttgatcaaaaccattcatcaagtctctaggaagttccaaactttcccacatttcctgtcttctgctgagccctccaaactgttccagcctctgcctgttacccagttccaaagtcacttccacattttcgggtatccttacagcagtatttcactacctcagtaccagtttactatatttgtccgttctcacactgctattaagaaataccctggctgggcacagtggctcactcctgtaatcccagcactttgggaggctggggcaggtggatcatctgaggtaggagtttgagaccagcctggccaatatggtgaaaccccatctctactaaaaatacaaaaattagccgggtatggtggcaggtgcctgtaatcctagctactcgggaggctgaagcaagagaatcacttgcacccagggggtggaagttgcaatgagctgagatcgtgccactgcactccagcctgggtgacagagcaaaactctgtctcaaagagatacgcgatacttggccaggcttggtggcccactccggtaatcccagcaccttgggggggctgaggtggacgggtcacttgagatcaggagtttgagaccagactggccaacatggcgaaaccccgtctctactaagaataacaacaacaacaaaaattagccgggcatggtggctcatacctgttatcccagctacttgggaggctgaggcaggagaattgcttgaacccaggaagcggaggttgcggtgagctgagatcaagccactgcactccaggctcggggaaagaatgagagtttgtctcaaaaaaaaaaaaaaaaaaaaaaaaaagacatacccgagactggataatttataaaggaaagaggttgaattgactcacagttccgcatggttgggaggtctcaggaaacttaccatcatggtagaaggcaaaggagaagcaggcatcttcttcacaggacagcaggatggagtgagtgcaagcaggggaaatgcaagatgcttataaaaccattagattggccgggtgcagtggctcacacctgtaatcccagcactttgggaggccgaggagggcggatcacctgaggtcaggagtttgagaccagcctggcaaacatggtgaaaccccatctctactaaaaatacaataattagccaggcgtggtggcacgtgcctgtaatcccagctactcaggaagctgaggcaggataatcacttgaacccaggatgcagatgttgcagttagcagagatcgtgccactgcactccagcctgggcggcagagcaagactcagtctcaaaataaataaataaaacccatgagatctcaggagaactcatgatcatgagaacagcatggggcaaccgtccccatgattcggttaccttcacctggtcccacccttgacacgtggggattatggagattacaattcaagatgagatctgggtggggacgcagagcctaaccatattgtttccagaccaaaccgagggtggggctgcttattcttgcagcccaataatgagatgcagatgaactggggaaaaagagagtttttatttctgtaaccggttacagggagaaggcctggaaattattgccaaaccaactcaaaattacaaagttttgcagagcttatataccttctaagctatttgtctacatgtgggtttgcattcatctaaagatataagtgattaacttctctgtaaccaagatctgagtcctgaagaccttcctctggagcctcagtaaatttacttaatctaaatgggtccaggtgctggggtgattacccttatcttgtctccttttaaatcatggaggtttggggagtttccttagaaccccaataaacttattcgtggaggcctggggagtttcttcagacccccaataaaatgtatttaatcctaaacgagtcctgttaagaattccttcattatcttttcatcctttaaggcccaggaaaggcctaggcaaaactcttggtgggcttttgttacattccagcctgtacatgagggcactggctctatcagcttttaatcaacttaaccactcagtcagtgctgaaaccgttgtcatggaagcctgcctgctcagctgttagtgagacctggcctgccacagtaccagggttcatgcctgtcaccaattccatgatcattttcatggggtgtctgactgacatttgtgatggggttgcctccgctcatcacagtcaacatgcacctcaccagcatttttattcttacaggttgttgccatggagctgaggatgaggaggcacctttagagccaggtgtttctgtaggagtgtcacaggtcatggctccaaagccctgtctatctacccagaatacccagccctgtgagacatgtagctcacttctgaaggacattctgcgtctggctgagcatgacggaacacaccccgagcagggactgtacacgtgtccagcacatcttcaccagcaccaaaaggagcagattagagagaaactttctagaggggatggaggaagaccgacatttgtgaagaaccacagagttcacatggcagggaagaccttcttgtgcagtgaatgtgggaaagcctttagccacaaacataaactttctgaccatcagaaaatccacactggagaaagaacttataagtgcagcaaatgtgggatattgtttatggaaaggtccacactcaatagacatcagagaactcacactggagaaaggccttatgagtgcaatgaatgtgggaaagcctttctttgtaagtctcaccttgttcgtcaccagacaatccactctggagaaaggccttatgagtgcagtgaatgtgggaaattgtttatgtggagttccacactcattacacatcagagggttcacactggaaagaggccttatggttgcagtgaatgtgggaagttctttaagtgcaactcaaacctctttaggcattacagaattcatacaggaaaaaggtcttatggttgcagtgaatgtgggaaattctttatggaaaggtctacactcagtagacatcagagagttcacactggagaaaggccttatgagtgcaatgaatgtgggaaattcttcagcttgaaatccgtcctcattcaacaccaaagagttcacactggagaacggccttatgaatgcagtgagtgtgggaaggccttccttacaaagtcccacctcatttgtcatcagacagttcacactgcagcaaagcagtgcagtgaatgtgggaaattctttaggtataactctacacttctcagacatcagaaagtccacactggataaggcccttatgaatgcagtggatatgggaaagccttcagtcaccaacatattgtggctggacagcaggcagtacacactggagaaagactgaatgccgtgaacgtgggtaattatgtaggtacagctctccagtcgctatgtatcagagaattcacactgcagaaatgtgtgttcagcaaactcgggacattattttggtttgactctcatctcattagacattggagagtttacactgaagaagagtcttttcaataaagtagaaagtggtaaagattcaacatgcaagattgtacttattgggcttcagaatatccacactagtgaaagtcttctgagtacagcaaatgtgtgacattattttgctactactccacactacttagacatcatgtagttcacactggaaaaaggccacgtatgtgccttgaatgtagccaaaatgacgaacaacacccagaaatctgtgatttagcactgagaactagtattatatggtttttaaaaaacaatggtgaagtacatgccacataaaatttgccatcttaactattgtaatgtcttgtttaatacttgaagtacattaacattgttgagcaaagaatatcctgaactctttatcttgtaaaatgaaactctataaccaccattaaaaaaacaactcattcccacattcttcagtccctggcgaccaccatatttttaagtcattatgactctgactattcttggtacttctcagaagaagaatcttagagtgtttttcattattttttttcacttaggataatatcctcaaagttcattcattttttagcatgtgtcagaaattttaaggctgagcaatatttcattgtttgcatttaccacatttcctttatttctgacatctattcatggacacttgggttacttctacctctggctattgtgaatattgctactacaagcataagggcacaaatatctctttgagaccctgctttcaattcttattgggtaccccaaaaagtggaactgctggatcacatggtacttctaactttaattctttgatgaactgagaaacttttccataaaacttgcaccgttttacattcctaacattccacaaaagttgtgatttgtcctcattctaatccatagaaggcaacatttctaacaggtttctaggtgattttgttgttgctgatgtagggactacattttgagaactgtcctatcccatttttataacaatgcagagcttctctgtaaataccccttgtttctatgttctatcctgtgagccttttcattttgttaatttttcccagtgtttacaaccaggaaatagcttgtcatctttgatacaaaacagaaatctttgcaaaataccaattgcattctgtagcccttggatcattttctcccccaatctatgtagatatttagtggtgtataatgttgtatgagaatacatcatggtaagaatacattttaaaggactttaagtcaggtcacaaaatacagcaatttacctgtggacctgccctctacccaggccatccagtcccaatgactgtgctcttactgctgctttccaggtgtgtacctatcatggggtgtgcatgccactgaccattcctctgtgctcttactgctgctttccaggtgtgtacctatcatggggtgtgcatgccattgagcattcctcttaatgggttctaggcaacagatagaatagcttaggtgccaaagccacagaacctatcaggggttgtgtcattttgaaaattatgccaaattctaaatgatcttgtatgacagcagtcccccaacctttttggcaccaggaactggtttcatgcgagacagtttttctgtggatggcagtgcagggggctggatggtttcggaatgaaactcttccacctcagatcatcaggcattagttagattcacataaggagtgcacctaggtccctcgcatgtaacagttcacagtagggtttgtgctcctatgatgtctaatgccgccgctgatcaggaggtggagatcaggcaggaatgctcgctcctgctgtgcggcactgtgtggcctagttcctgacaggccacggactggtacggtctgtggtttaggggttggggattgctgttaaatgggatttggggaattttatttgggttctctctttgactagtctattgtcaaagttattccatctaatttttctagagtaagccaggttctgtgtcatgtaatagagccacataaacagcaaaggtgctattgtgaactgtgcatacgagggatcaagttgtgttccttatgtgaatctgagctaaaataagaaaaaaaaaaatttagcctgtgaggtcagaagcaagacagtcatgttagatttctgtcattattcatagttctgcaaaggtggtttcaggttctgcatcaactgaaacgtgctcttccatccagcagcatttaaaaccaaagatgctgtcccttaattagttaactctcacaatccattttagtaatggttcctcaggaaactgactacttcaatctataaagtaaaacaagttcttcacattatactctctggtttgaatagttacttggttttgttcttccccacaatgactaccttcttggtagccgtaggtctcagaggcattttctgttgtccctaaatgattctgcccttggtgggaggtggcttttaggctggctggtggctttcgttcagatggactgaaatctaagcttgatctagcatcaagtttggacccagcactctctaatttttttttttttagctgttatagataacaaaggattgagtaatttgctttttgcttattagcttgcattttcttatgcatccagtgaaccagagattgaatattttgctttttgcatattagtttgcattttcttatgcatccagtgtaccaactccctgggagctggatccatctctaaatttccatggtaactcttacctttagtaactgagcacagacagccacagttccataccatgtatggccatttggccactaaggaatcaaaggtttttcatcctccacccatttttaaattgaggattattcaaaagttaaagaaaaaactttattatctcttattaatatatgtaaattgtgttcaaaatagaaaatgaacttctactttttttttttttttttttgagatggagtctcactctgttgcccaggccagagtgcaatggtgcgatcttggctcacttcaacctctgcctcccgggttcaagtggttctcctgccacagccccctgagttgctgggattacaggtgtgcaccaccttgcctggctaatttttgtatttttagtagagacggggtttcaccatgttggccagactggtctcaaactcctgacctcgtgatccgcccgcctctgcctccacctcccaaagtgcttggattagaggtggagccaccgcacccagcttttttttttttttttttttgagacagagtcttgctctgttgcccaggctggagtgcagtgatgtgatctcggctcactgcaacctcagcctcctgggttcaagcaattcccctgcctcagcctcctgagtagctgggactacaggtgcgcacaaccacgcccggctaattttttatattttagtagatatggggtttcaccatattagccatgattgtctcaatctcctgaccttgtgatctgcccgccttagcatcccaaagtgccaggattacaggcatgagccactgcgcccagccgaaattctatttttatatttgtgtattgtcaatactaaagctaatttgaataaagtcttataaacaaatccatccaattttaatcaggttttgaccacacaaggtaagatttttccgtaaaccttttataccttcttacaaatttttttctatttttctctttccccaatttttagatctatttacctttgtttgagacagaatctcactctgtcacccatactggagtgcagtggtttgatcttggctcactgcaacctccacctcccaggttcaagtgattctcgtgcctcagccccccacatagctgggattacaggcacacaccaccatgtccggctaatttttgtattagtagagatgaggtttctccatgttggccaggctggtttcaaactcctggcctcaagtgattcacccacctcagcctcccaaagttctgaaattataggcttgagccactacgcccagtcctagatctatttacttttatctacattattttcctttcattttgaaacgacctttacataacccctaaactagacagaattcctttttttttctttctttcttttttttttttttttttgagagaagtctcactcttgttcctcaggcttgagtgcaatggcccgatcttggctcactgtaacctctgcctcccgggttcaaacaattctcctgcctctgtctcccaggtaactgggattaaggcacctaccatcacgcctggctaatttttgtatttttttttagtagagacgggttttcaccaagttggccaggctggtctcgaactcctgacctcagatgatctgcctgccttggcctcccaaagtgctgggattacaggcgtgagccaccacgcccggcccagaattactttttctttagcaaaaaccacatcttcattttttaaatataagcttcttcacaaaaaacacatagtaaacatcatggcactgggctgcacaatactttgatagagcacgttgatgtaaagacatttttgtaagtgtttagagcatgccttttatatctaaacatgcaaagaaatgagtagcctcctgtcgtaataaccatttactgtaaacaactgccaccagctgcttctgacactgcagctcttgcttgtgacagccattacgcacaaaaacgtcaagttctttcacaggacaaagtaatctctggtaccccccaaaaccaatgatatcaggtaatgcactacaaaagaaggcagaattttagacctgagataaatctgtcctcttaaaactcttgagtgagagagagagagagagagagagagagagggagagagatttcctcatctggttagtgtagatagcaggttggcttcctgagctggtcagtgcagtagtgggttagagttctgttttatatttggcttggccattgttgatttctatagtcaatttcttacatgtaaacaaggaagatagctataatattgagatttcttgttttcttaactggtcttaggttgaaaattgatttttcattctcctccccgctcccccctccccccaccatcccattcttctgcctctgccggatcttcagctgggtagcattttggttttgtttgttttttaacctggaggatgtccccaaatatcaaaacctaaacttctgattcttagaagtcctcccttcgatgagttgctagttttatttctgaacatgaacttaccaaaacatcccccagaaatcccctggtctcagacataactctctatgcttcccattccatggcagcaactcagcctaactcatccaaagcaaaaaagcaatcccttcttgcttaagtgacacaaggatccccagatgaacaagtagctgtatcacccttcaattaaatgtaataatatttacttctggtggaacctctccttccttggaacaaagggcccccaaccagcagaatttacaattaagaagaagtggccagacacagtggctcaagcctgtaatcccagcactttgggaggccgaggcaggcagatcataaggtcaggagttcgagaccagcctggccaacatggtgaaaccctatctctactaaagatacaaaaaattagctgtgcgtggtggtgcgtgcctgtaatcacagctactcgggaggctgaggcaggagaattgctttaacccgggaagagggggttgcagtgggctgagatcatgccattgcactccagcctgggcgacagggcaaaaaaaaaaattagccgggcatggtggcgggcgcctataatctcagctattcaggaggctgaggcagaagaatcgcttgaagccgggaggcagaggttgcagtgagctgagatcgcgccaatgcactccagcctgggtgacagagcaagattctgtctcaaaaaaaaaaaaagaaaaaaagaaaaaagaagaagggtagcagaaattctgtgaatgagttactaggttcaaaaatgaggatgctcaatataatgcataggttcagaaaaaaattacgatgaaaagaattgtcaaattttgtaactgatacttgacctggttaaatttgaattatttctaattccctatgtatatgtgcagtgagataaaagataaatattgtatgtgacatactcatcataaaattatttgttgtttatctgaaatacattctaaatcaggggtccccaacccctggggccacagatgagtactatggcctgttaggaatggggccatatagcagagggtgagtggcagatgagtgagcattgctgcctgatctccgcctcctgtcagatcggcagcagcattagattctcataggggtgcaaaccctactgtgaactgcacaagagagggatctaggttgtatgctccttatgagaatctaatgcctctgaaaccatctgcccccaaacccctctcccttatccatggaaaaattgtcttccacaaaaccggtccctggtactaaaaagcttggggatcacagttctaatgacataactctttccctgataatttgcttctacttaacaattccttgttttatataatttgcttacagaattcctgcagttacagtcttgatgccatttatgttgtgacaaaccttcgtcatttgtcatattcaacttatttcattcctttatctattggacattcattaatgagaaacacactcaacagtagcattctgagcctaaagactcatgatgataaacagtgtagaaaacattacaaactctattataattattctaccatctccatctgattttaacaaaaaagttattttgtctctttctttggaactagttgagaaaatcatgcaccttccaaagttaatatatatttgactgtccaccattttcattagtcaatgggcaattacatagagtcgaagaccttcaaagggaattttaaatactcctcagttcatcataaattataaacttgcattttgacattttttgcattcaatatactcaaaatatagacaatagcaacttctacaagagttgaaaaacattgtgggtacagtggctcatgcctgtaatcgcagcactttgggaggcctaggcggacagatcacttgaggtcaggagttcgagaccagtatggccaacatggcgaaaccccatctctaatagaaatacaaaaaattagccaggcatggtgccacgcgcctgtaatcccagctacttgggaggctgaggcatgagaatcacttgaacctgggagccagaggttgcagtgagccgagattgcgccactgcactccagctgggtgacagagtgaaactgtatcttaaaaaaaaaaaagaaaagaaagaaaaaagaaaacactggagaaaacgttggattttacaatgtatgtctgggtcagttagtctaccatttcatatccaaactcataactaattacaaacagatggaaccattgaaagcttgcaaacttttaaattatattcatataattaaaatataagtaataatttatattcaattaagaataaatggggccaggcgtggtggctcatgcctgtaatcccagcactttgggaggccgaggcaggcggatcatgaggtcaagagatcgagaccatcctggccaacatggtgaaatcccgtctctactaaaaatacaaaaaaattaactgggcgtggtggcgtgcatatgtagttccagctacttgagagtctgaggcaggagaatcacttgaaccggagaggcggaggttgcagtgagccgagatcacaccactgcactccagcccagcgacagagtgagactccgtctcaaaaaaaaaaaaaagaataaatagattttgatatctcaagggaaaaaaagtgatattcctatttgtctgcagggcagagctgtagtggtcaggcagtctcctcaaacaaagccaaaactgctattatatgagcttttaggaaggctggccttcagggactgaggactttcagaagcagcagagttgaaagactgatggactttcaggtatgttagtgtaaatgcaaccatttaccaactggctttcataaacaggattactgacaggaggcacttgtggattagttgttgccagcagcctggggctgccactgattgaccatctttagtactgggccttacccccattggaaaaattttagaatcttggcctaacaatgatttgctaagtttctggttaattactggggtgaagcttttgctgactagctgacttttaaagcataggtacacatcccaagttatctctaattaatggtggtttcttgtttatgattatggatttggggcagagataaattttttccttacttgaacataagccagcaacttaattctcattccccatttttggtttcccaacagccagaatttgtaagaaatcatatgctatggtttggatgtttgtctcttccaaagctcatgttgaaatttaatttccaatgtttgaggtggggcctaataggaggtgttctggtcatgagggtagatcctacctgaatacccccacttgaagatgtgtaaattctcactctattagttcccaagaaagctggttgttgaaaagagcctgatacactccccacccactgtcctcctctcttgcaatatgattccttcgcattatagctctctttcgttttccaccatgaatagaacccgccgaagaccctcaccagatgcagatgcccaattttaaactttccacacatcaacattttgagccaaataaacatttttttctttataaattaccagcttcaggtattcatttatagcaacgctaactggactaagacatcataagtattatctagatatttgtttgtgaggatatgattttcaactcatgttgccaatgagtaatttaacggccagttacagtctgagaaaaatgtgtctcccactggtgattctttgtaatatattacaaccagctgatatgtaggatatgtaggccattctgataagtcaatacaggattcaggaaaaatcgttatatataggtcatattcttaaactgtgcccaggtcttaattaataattagcaatgacacagaggggacactgccatcaaaagaaaagattaatgttacagttccctggaaataagaggcactgaacaccacacaggccacaagaaaccttattacatacagagactggaaagcagaaagagaaaacagagtaactggaagtatgtctttataactaaagtggcagagaatgatgaggtagagataccgtcgatgggcaggaaggaaaaacacattttagtgtttgtggttggggggttttatatgagtttcatgcacttgagtaagtggcttgcaagaaaaaaagtaaacaactttggttctattagtttgaccctgtgattaatgaatatcaaacagacaaatacagaatctaagaaaacatagaacagtcctgtatacacatagcagctgggaaacctattcccagtgtgtcccatgcacctatcattgatctgaaacccaatacatatgtgctcattgaacatttactagagaagtaaatacacattatcacacagcttctctattcatttttatctgtggcaagtctttcagtttatcatctgtacttacccctctaagcagttaatgagcaatgttttcaagtgtgtaaaaaaattacattttggaaacaaaagcatagtgtgtccaagtgtccagcagagccacaggttcaacttcattctctgacttctcagaatttgctgtctctcactcaaacattgagatcttatctttttctcacattacagatcgatttctctagggcttctggttttttttcttttggaataacctacataattactaatagatttcggtaatttttttatttcacaagtgtttttcacatttcgactccctgtgcaaatacagttgtaaacacaggtgaaattttaaatcacttctgaggaagaagataacatcatggaattccacaccttttttgaggataagatgtgcatatgcttcaactatgaaaacggtagacaatgttgtccagaaatggcatgtatcagctgctcttgagaaataaaaataaaattctaagcaccccctaactgactgaatggatgccctcttgaccatgagaaccctagaataactttggaagctgaattcaccactatagaggaacgggaaatcagacacacctcattatatcccctaccacactacaatcattaggttttcttccctaagggctaaatagaaatcaaccttttcagaagactactagcttatcttccaaggtacagaacagagagaagatgagattattcattccttcatccttctctgagacatcttctttattcccttttcccctcacgtgtttactctatcttatgtaaaatgtagatttactgggcactaactaaagtttcacatgtctgtaatcatttgtctcactgccaacccctcttcctttttaaggaaaatgtataataaatactaaacctcctaagaacctctttggaaaaaccagccacagatgcttctgtgacttacatttttctggatgtgcccttaggctggtccagtaatcctccatgatttgtgacttatgcctcaatcactcattttggtcgtcactctcattttcagataggattgtgattcttaaaataaatggaaaatatctcagatatgaagtagtaagtattattagaataaaagcgttgcacccttcgtaggaacacaatcgctgactctacagtcaggtaagatgtattctctttgatccagaggcatagcttcaccctttcaacctacttcagcgtctcctgtcatccttcctacaaattccagtccatagccctaactgcgtagtctttctttcttcttctggaccaaacatattgaagcttactaaacagacgccaaagcgtaactgtatgtgtatttgaaaagcaataatatggctggcaggcatgagtagaggcagactgcctttatggtatggggtgtctctttggacctgtagttattgggaattagctgtgcttaatagagtcttaagtaataagttgctaacatttctgtaaatatcctatactacaatccaaaaaaataccgtatgttgcctttaagagcaagccaagccccctcctgtctttggagtcggggactccgtttcccagctcccctgacagtgccactgggcctttatctgccatataaggactgatcaacgctctaagacaagtccggaagcggtgtcgaaacttcataacccagaagacactgcagctctcggcggcacgacttacccaataaaggcttagaaggggacgtttgcgtgcgtgcgcaccgtcggagggcgggacttccgccgtcctcctggtggtggtcgttttggttctgtgtggtgtttcaccaacttcggcctatggctctgtctgacgtcaccgaagtgacggaacggaaaagcgcgagaagcggctcggttcccaccacggagaggcgggagtgagtcaactgacaagcgctggggacagtggcgtccttgtcttgcctttgtcgctcccgccccgctcttccctggctgggctggcggaggccttgctgatgaacctgactgaggtgggtgtcccgtcccaggctcccccgcccgaccggtcctcccagtgctgaagccccctgaaggggccctgcaggtcaggccccttgtcccgaagagaggggcgttcctgtgtggggtccccgtatcagccgatttgatgcagcctcagagctcccgttagggacctcaggttcagagcatggaggcgctgccgagtgggctgtgttggggcgtcaggggtgtgtgttgtttctgcgggaaagagagggttttgtgaattctcgcttggaatggcaacctgagcagccagtaaccatggaaggttgtcaagggagggacagttggagggggcaggtccagagttcgaagtttcaagttaggaaaaccaggttaggaatggacacagggagacgcgaaaaggccctgaggccactgcagtagacccaggagaattatggttggggctggaccagtgacagtagagggagatgtgatgagattcttcataggcctgaaagatagggcccgtaggttttcctggtgcttcagttatgtctgaacaaaggcagtgaagaaccgtttcaagtgtttgttttgttttttgttttctgtttgaacgtttggaagaatggagttggggaagtcagcataaagagcagatttccgggagaagatcacaggttggattttggacatggtgattctcaaatgtctcaagatggatatgtcacacagacaggtggacataaaggtgtggagtctgaggaaggggattgggttggcgataccagacggatggagggcttggactgggccagagaatggtctgaggatcagattgagtaggtcggtctcgggttttttttgtttgtttgtttgcataaatttaaggagtcaagtgcagttttgttatatggatatatttgcatagtggtcaagtctgggcttttaatgtatccatcgcctgaataatgtacattgtatccattaagtaatttttcatcactcatcttcgtctcatccttctacctgtttggagtctccaatgtttgtcattccacactctttgtccatgtgtacacattattcagcttccacttgtaagtgagaacatttggtatttgactttctgtttctgagttgtttcatttaataatggcctccagttccatccacattgctgtaaaagacatagtttcatgcttttttttttttttgtggcctagtggtattaccttgtgtatatatatgccacattttctttacccagtcatacattgatggataattggttaattccctatctttgctattgtgaatagtgctgtgataaaaatacatgttttttttaatgtaatgatttattttcctttgggtagatgcccagtagtggaattggtggatttaatggcagttctattttcagttatttgaaaaatcttcatactgttttccattgaggttgtacttatttacattctcaccaacagtgtgtaacctttttctcttctccatatcctgggcaacatcagttgttttttgacatttaaatgatagccattctgactggtgtaaggagatactgtggttttaatttgaatttgtctgatgattaatgatgttgagcatttttttatatgcctgcttgcgatttatgtgtcttctttttgaaaaatgtctgccctgtgcttactgttttttttttttttttttttttgaaatggagtctcgctccgtcgcccaggctggagtgcagtggcgcgatctcggctcactgcaacctccacctcccaggttagttcaagcaattctgctgcctcagcctcccaagtagctgggattacaggtgcccaccaccacgcccagctaattttttgtatttttagtagagacggggtttcaccatgttggccaggctggtcttgaactcctgacctcaggtgatccacctgcctcggcctcccaaagtgctgggattacaggtgtgagccaccgcgcccagccctgtgcttactgttaatgagattttttgttgttgtttttttgttatgttttgtttgtttgttgttgagttctttgtaaattctggatattagtaccctgtcagatgcatagtttgcaaatatttcatcccatttttcaggttgtacatttacttggttgattagtccttttgctatacagaagctgtttagtttaattaggtcctgtctacttttgtttatgttgtttatgcttttgaagtcttattcatgaatttttttgcctagaccaatgtccagaaggggtttccctgagttttcctttagtattcttcgttcaggtcttacatttaaatctttaattcatcttgagttgatttttgtatatggcaagagaaattggtccagattcattctttttcatatggcaatccagttttcccagcacattttattgaaaagtgtgtcctttccgtagtgtgcatatttgttgcctttctcaaagatcagttggctatagatatgtggctttatttctaggaactttgttctgttccattgatctatgtgtctatttctgcagtcaaatgctttaccactgagctgtacaccttatgtgtctatttctatccattaccatgctgttttggttactaacaacttgtagtataatttgaagtcagatggacttaatttgagggaaatcttgaggttgtcatttcaggtgggctctgtgttgagagaacagggggctgagacttgggggccagaccattggtggctccacagacatcatactctgtccagaacggtgcagacctggcataacagggattctggattgcatctgtaaaaagggaggcctggactgggtaagcatatggcctgggatggaggctgaagtgtgaggtggtttcgatcctgcacctgcaggcttggttgaccctcagggccactctctgttgaacaagagaaatgttattgaggctggtggagtagctgggttccagatcagagcactgctttttccccttctctacatgtcagggctacaggggatgatctactgctccagccaaggtctcctggcaagctcactttagaagattatgtagcaggtagacctggttgcagaaaggaccagtacctgacctgcctactcttcccttctctataactcattaacttaataatgtatgaaacacttattgatttaaaccccaattagacagtatctttctaagtgtgtgcaaacagataggcagttaatagtgaagtcattatgttaaatttctaaaagtgagccgggtgtggtggctcacacctgtaatcccagcactttgggaggccgaggtgggtggatcacctgtggtcgggagttcgagaccagcctgaccaacatggagaaaccctgtctctactaaaaatacaaaattagccgggtgtggtggcgcatgcctgtaatcccagcttctcaggaggctgaggcaggcgaattgcttgaaaacaggaggcggaggttgcagtgagccaagaccacgccattgcactccagcctgggcaagaagagcaaaactctgtctcacaatagaggagaggagaggggaggggaggggagggcagaggaggggaggggggagggcaggggaggggaggggagaaagtggttcataattggtttgatgttaatttatctcgtttgctttccttggaaaaagttaatatcgcatcctctaaaatcttaagctaaaaacatacatgaaaatttcaaaaccccactctttcatttgcattgaactcatgtacaaaaccattaatcttggaccatagccgctgatatatatagtacatgctactgatgtttgatactaatatgagccctgtgagggggcagctattcttgcaatctatttacagatggagacactgaagctcaggtgggtttggttcttttccatggtcacagagctgcagcactgaggcctgaggaactttattcaatgaattgagatcagtttgctcccaggcagggcagacgaggtggtggtccatctcagcctgaaggatccttccatggctgtcaatttctcacggcctttctcttccctcagggtcccctggcgatggcagaaatggaccctacacaggtgagtagagtgtttcctactattcacccaccctggttatctcccagatggttttggcaggtgacaaaacctcttttcctgtctttctcttatgtctgaagggtgagtggtttcaccagttagtttcagtattacaagttggctgctgggttacatagactggtccccgtttttgagaattgatctgataagatatgtttgggcctcttgggcacaggattcagaatgtttcaatgtttggaggagagactgagctaggtttttagggaactgcaaatgtctgttacatctggtaggaatacggagcagaatgggaggtggctagaggcacacaaacatcaggcctggaatgacagcctaggtcctgggtctgtaatctaagggaagtgggagacggggaagatttgaagcaaaataggtagtgataggaccccagtttaagagactttctttggcttctgagtggaggacagactgtggaggtgagggtaatggaagggagatctgagaggatgttcctgcagcagtctaggtggatgttggtggtggcttgtcaagagtggtcatagcttcagttttaactagagctgcccacattttatgatacagagagtgaggcagctggggaggtgggatagaaggggaatcaggagtggccccatggtttttgtttggaagcatagatgctccatcagctaagatgggagaagtcagcagtattaggaattttcagagtgagtgtgaggagtcagtgtttgttcaagccacagatgtctcagagactcctgatggaggagttcaggttggagatgtccacactatggtggctgtcgtatggaccaggatgaagccatggattcagtttaggtgacagcatctctaggttatggtggcagtgctgttcgaagacagagaattggaatggggcatgagaactgggtctcttactgggtagctgtgcagtggtggaggagtcactagacaaatgagggaatggagtgtttgtggggatgagtgtatgtgagatggtggggtataggagtgagaaagacttctgaaggagagtggacatgatggggttgctgaggggggataatagggtgaggtcggagagttgctaactatcagttgggaggaggtgaggatgggagttgtattaatccgtttccatactgctgtaaagaactacctgagactgggtaatttatgaagaaaagaggtttaaccaactcacagttcttcaggcttaacaggaagcataactgggaggcctcaggaaacacaatcctggcggaaggtgaaggggaagcgaggcacatcttcccatgatggagcaggagagagggagagaatgaagggggaagagccaaacacttttaaacaaccagatctcgtgagaacttactattatgagaaaggcaaggggaaaatatgccctcatgatccagtcacatcccaccaggtccctcccctgacacgtggggattacaatttgacatgagatttgggtggggacacagagccaaaccatatcaggagtggaaatatggaggtcagtgcagctgggcttggaatgaggttttggtggagagcaattttcctgactgtttatgggacagagtgtaccatgaggcaggacacagctgagagtatgggaagtcctcacatggtttgggcagctgacagtgaagtgagaaacagggccgtgtagggaaccttcaacccagggcttagggctgcccccggtgctaggggactttggtgttctggggcaggactgggaatgaattggatgctgagcgtatttgccgtgcaccacctggtttccgtgtgcagagtggcctgttaggaggtgaaggaaatgcctgtggtgtgggctgggagttgtctgtggaattgactggagtggaggtgtgagagatgggattggagtgctgtccaaagagtgatgtgcaggcaggaggagtgtgaatggagggcctcaggccctggccctggtagctcaagggaggaggatgagtctgagtttggttgtcttgggaggcaagatctgggtgactccatggcaactggctggcaggagaggatggatccccccacgggaggcccacattccttttctaccttatcttccatctgtttcctctgtgtgctggacacggtggccaatgtcaatatggagagaaaagtcactcatgccacctggatgtggtttctcttccacattgggagggtgtggaagagattgagcaaggaatggaggcgtaggggacagcgatgagatcctggagagagaaatgtagcagtcattttacctattgggttttaatttatggatgtgagtgattgatgctggggacaggccaatgactgaaagaagatatttattccttgcatttccccaaggggggtacataccacataacacagggccacatggtgaggcaccagatttggtcaggaggaaaattggagtgaggggaaagtttagtttagtccacggacgctattggggtttccaagggaaagcaatgcagggctgggcgtcaggatagtttggctagtttaaataattccaggacacctgggctattgggactgtccctagttttgcagtacctggccctgggttgatttagagtacgggaaatattggcttggtttgagaatatgggcccagggtggtaggggagatggaaacacatttggctgttagtttggccctgtgtttaatgggtggtaaatataagtagaaaatagagaacttaagtaaatacagcttgaaaagaagctgcttatgtattcatctttcccaatttggcagggccgtgtggtctttgaggacgtggccatatatttctcccaggaggagtgggggcaccttgatgaggctcagagattgctgtaccgtgatgtgatgctggagaatttggcccttttgtcctcactaggtaaggccctcacacttgcccagtgtcctgggttaggctgtgttacccctttttacccaaaggcagctctgcgtttcccacagtgagaccgtgggtgctgcttcttttccctgtttcttggcatatatgctgtgggaggcagggctgggccgtgtgttttataccccctttttcctagcatccccatccctgctgctctgaggcttacaagaaagggctcaagagccagaaatgttgaatttggcatagagaccccaccagccttgtctgtccctggtcaggttactctgtccaaacacatgagacctgtgttctgttgtcccctttctctcactgatatttcttggtgccttcctgtgcttggaatttcaggcactgccctggtcactgattttggggactgctgagttgactatgcaggacgcaggactcttctgtgaagttcttacgattatagaatgtgggatgccatgggcttgatctctctgggcatgtgctctttactctttttctctttctttcccctagagagggccccaggcacctgagagggtggatattacttcaacaatggcattagaggctcagggacatggccctggtgcctgggaattgggaaaagggttgatgtcacagctggggtcaaatcaccctgggaacctgtcctgtgttcaccattgtttgttgccagggccactggccacagatttctaccttttcttccccattatcatttctagtatgactcctggcccctgcacctccaatgccccacagtctgtacttctggggccaccacccttcaaccattcttttccactgctccctttgaatgcctgccaacacgtggcctgtatttaacatggtgtgaggtctgcatgtatccctgaacacaagctcctctgtcacagtctgatctctctgggtttggagagaaccttctacacactgcttgccagtctccagcaaccatggcctgttgatggctgttttcagaggagtgagttggagaccctgccttctctctctgtaccatacccctcccttgtatgcttaccatcatcagggctctcccattatggggccttgccaggcccagccctgcatagtggaccctcctctcactggccttaatgtccatgatgtccccaatcccatggccttatttgtgtgtgtgcctgacacacatttgtgatggagctgcttcctcccaccagagtcaacatgcacttctccagcatttctgttctgacaggttcttggcatggagctgaggatgaggaggcaccttcacagcaaggtttttctgtaggagtgtcagaggttacagcttcaaagccctgtctgtccagccagaaggtccaccctagtgagacatgtggcccacccttgaaagacattctgtgcctggttgagcacaatggaattcatcctgagcaacacatatatatttgtgaggcagagctttttcagcacccaaagcagcaaattggagaaaatctttccagaggggatgattggataccttcatttgggaagaaccacagagttcacatggcagaggagatcttcacatgcatggagggctggaaggacttaccagccacctcatgccttctccagcaccagggccctcaaagcgagtggaagccatacagggacacagaggacagagaagcctttcagactggacaaaatgattacaaatgtagtgaatgtgggaaaaccttcacctgcagctattcatttgttgagcaccagaaaatccacacaggagaaaggtcttatgaatgtaacaaatgtgggaaattctttaagtacagtgccaatttcatgaaacatcagacagttcacactagtgaaaggacttatgagtgcagagaatgtggaaaatcctttatgtacaactaccgactcatgagacataagcgagttcacactggagaaaggccttatgagtgcaacacatgtgggaaattctttcggtacagctccacatttgttagacatcagagagttcacaccggagaaaggccgtatgagtgcagggaatgtgggaaattctttatggacagctccacactcattaaacatcagagagttcacaccggagaaagaccttataagtgcaatgattgtgggaaattttttaggtatatctccacactcattagacatcagagaattcacactggagaaaggccttatgagtgcagtgtatgtggggaattgtttaggtacaactccagccttgttaaacattggagaaatcacactggagaaaggccttataaatgcagtgaatgtgggaaatcatttaggtaccactgcaggctcattagacaccagagagtccacacgggagaaaggccttatgagtgcagcgaatgcgggaaattctttcgttacaactccaacctcattaaacattggagaaatcacactggagaaaggccttacgagtgcagagagtgtgggaaagcctttagccacaagcatatacttgttgagcaccagaaaatccacagtggagaaagaccttatgagtgcagcgaatgccagaaggcctttattagaaagtctcacctggttcatcaccagaaaatccacagtgaagagaggcttgtgtgctccatgaatgtggggaattctttagctaaaactccaacctcattaaacatcagagatttcacaatggagaaagtttaccattgactattgtaattgggtagtaatgttatataaattccacatttttatgcaactaatctccagaacatttttcctcttaccaagaagtaaaatgctgtacccattaacaacaactcattccccttccctacttccccagaaatgtctcaactatatttctatactctatggtacttatatgaggtaccaatagatatctatgaatttgatatatatttgtacctcatataagtggattctacagtatttatcttttgagactggcttatttcacttaggataaggtcttcacggttcacccatgttgtataatgtgtcagaatatccttcctttttaggtgaaataatattctatggtatttatataccacatttatttatccattcatctgttagtggatacttgggctacttccaccttttgcctattgaaataatgctgctatgaagatgagtgtacaagtgtctattcaagattctactttcaattcttatagggtatatactcagaaatggtggtgctggatcatataggatttctattttttttttttgtttgtttttgagacagagtcttgctctgtcacccaggctggagtgcagtgctgtgatcttggctcactgcaagctccgcctcccaggttcatgccattctcctgcctcaccctcccgagtagctgggactacaggtgcctgccaccacgcctggctaatttttttgtatttttagtagagacggggtttcaccgtgttagccaggatggtcctgatctcctgaccttgtgatctgcctgccttggcctctcaaagtgctgggattacgggcgtgagccaccgcgcctggccaggatttctatttttaatatttttgggaaaatttttccatagtacctgtgccattttacattcccaccagcagtgcacaaggattgcaatctatatacatcctcaccaacattgttcattttctatttctgtttttggggttttttgtagtgccttttgttttggatagcagctatcttgttggatgtgaggtggaatctatagtgtctttcatttttattttgtgaatgattgatgatgttgaggatcttttcatgtgcttgttaggcatttgtgtatctggaaaaatattcaagtcttttttttccatttttaatgggactatttgctttttgttgttgagttgtagttctttatacattctggatattaactccttaccaaatatatgctttttacatattacctcccagtccataggttgctttttcgctctgttgattgtgtcctttgatgaaattttaagttttgatgtactgttgactctttctgtctgtgggttctgtattcatggatcgaagcaaccatggatcaaaagtatttggagcatccatggattgcagtgatcattaatcaaaaatatttggaaaacaaaaagggtagttgcatctgtactaaacatgaacagacattttttcttgtcattattccctaaactatatagtataataaatatttacatagcatttacattgtattagaagttataaataacctaatgataatctatataggaagatgtgtgtaggttatattcaaacactatgcctttttatgtgagggacctcttgagcatcagatgattttggtatccacaaggggtcctggaatcagtcccccacagacaccaagggatgactgtagtgcattttatctatttttacttctgttacctgggcttttgatgttatatattaaaaaaaattagtatcaaatccaatgccaagcattttccctatgctttattctaagaattttatatttgaaggtcttacatttaggtcttttttttttttttcttttggaggcagagtcttgctctgtcacccagcctggagtgcagtagtggaatctcagctcactacaacctccgcctcctgggttcgagccatcaccccacctcagcctcccaagtagcttggattacaagtgtacaccaccacacctggctaatttttgtatttttagtagagatggggttttgccatgttggccaggctggtcttaaacttctggccttaagtgatccccctgcctcggcctcccaaattgctgagattacaggcaggagttgtaatgcactgtgcctggctacatttagatctttaatctacttggggttcatttttgcatatggtttaaggcaaaagtccactttatgtggctatccagttttccaagcaccattttttgaaaagagcatctttcctctgttgagtagtcttggcacacttgtcaaaatcatttgtccatatatgccatggtttatatgtggattctctattttattggtcatatgtctgtctttatgtcagtaccacacattttaggtgtgtgtgtgtgagactcagtgttgaggacaaggctagtgggctttcacactccagactgctgtattccagcccaaattactcaaattagccaatccatggggaacatggaaaacgtagctaatgcaatccgcttgccttacctaagttgtcccctgcagcctcaggttgctgttactgtgtttcagatgcaaccctctgtgggaccctacccaagttctctcattcttagctataggtaataaattgttctgattttgtgtatccaagtgacattgggttgtttcttgctatcagaagaacccagaaaagtattatgaatctagtgaatgttggaaaatctttagccattagcataacctcatttcgtgccagcatgttcaccctagagaaaagtagaagtgaaggcaatgtcatctttccttgttaacatgataactcagtagagcaatgctttggagattagctttttagggagagagccagcagttgagcctcctgcatctgaacatccacactagggatattgtctgtactgccagatatatgggaagattttgtgaactgtgttgcagttttcaacttgactggggcctttcccagagttatgcccctgccagtgcctatttaaaaatgtcatctcttttctaccaactggcaaagagccatggtgtgtagcattttagtcacattaaaatgcagttatggcagcatgctgtgttctctatctgaagaattcactagtcacttgaacactttggagtcctcacccccctcctatgattgattagggcatagacatcagccttggacagaagacatggactggctttggcaggcagattgcagaaatttcctttctccaggggaaagtattggttatctcattgatagtggtaggaggcagatacattgctaggcagactaaggacgggtccctggtgaaacccaaacttcaagccaacgacagtttaaagcctgaaaattgagctgccagttccaagtagagtccatgactggagtgagaacttcctcaatgccttttagccaatcaaatggtgctttttccaggcccacccatggaccaatcagtatgcagtctccattctgagcccataaaaaccctgggcccagctacacattgggctacccactttcaggtcccctcttgttgagagcttttctgccactcaataaagttccctgccttgctcactctctggtgtccacataacatcattcttcttggtcatgggacaagaactcggaaactgccaaatggcgggtgtgaaaggagctgtaacactgtagccctcctgccttccaccagccccaggcagccaccccatgtgacaggaagcagcggcagcagggccaggccagcccatgagccatgggctggagcagggtggcaggaccaaacaagctgtgacacacccccattcactgaagtgtgtggatggtgggaacagacaagctgtaacacaaatgagctgtaatgcttccttggggctcagaccttgggattccctgagcaaaagctgtaacaccccttggggctctgtggttgctggcgtctctgagtttttgggcgctgccatgtcccccttgtccagataccagcttccaaggcagaagccggtcgcagcacgcctggaccagctgtaggccaagcacagagccatggtgggcacaggatccggctggtaacatgagccaagcacagcctgtcggactgagttagttgagtgagtccagcaggccaagtgatgtctgggcagaagtgcttcagccatggaggtttctgcctggtgaagtggcactgaaagtatcttgtgtcatcatgacacttgggatggaattttccaacctgccagtcacccacactgtgaactccttctcacccctaatgcacacacataccctggttggttttgtgataataaaggtcacattgtttaagctaccttaactcttggaaatctagtcaccgtatgcagtgggttttgaacagaattggtctctgctagaataaaagcatgaatggttttttgtgggacctttactttgtgagctccagagggactagtaggaagcaaaagatcagctcgtatgcagatttgggccaatttgcattgccatgagaagcctcctgggaaagtctgaaggacttctgcacaaaatttcaagccctgagtacaaagattatttgtattcagaaaagtacaatttgaggagaaaacagttgccttgatgtttaaggcattgggcaacagtatgcattgggtatccctacccatatttcccatatttcccctgcattgatgagggatagctgtttcttgtgacctgctggaagctatgggtcctgaagtaaaacactatctaggtatatgttcctggctgttgacctttagggctagatggaagccatattcttttttttttttttttttcttgagacgtagtctcgctctgttgcccaggctggagtgcagtgggatgatctcagctcactgcaacctcgcttcctgggttcaaacaattatcctgcctcagccttccgagtagctgggactataggtgcacgccaccacacccggctaatttttgtatttttattagagatggggtttcaccatattatattggccaggctagtctcaaactcctgacctcgtgatccgcccacctcagcctcccaaagtgccaggattacaggagtgagccactgcacctggccagaagccatattctataataaatagtggttggattaataggacatgggagagactgcagtagagtggatgagtcccctctaaaggagcactcacaaatgccctggtagctatggctgtgtggggtggggtattacaggaattccaaagacctaaggagctgtgtacctcctgtagccaaggtcaatgtcagaacaactaaatcaatgattttatgaattcctgtagcctccctggactataaatttcaaaccatagttgcatcatctacatagtgatgggccttgagccttccctaaagataaaaagcctacatagcccgtgctgccccatcacctgtgtgtcggaacatcttccttgtttcaagctacatgagtgcttttttattctgttgaagtgtgtcatgtcatgcctggtgaattaataaatctgtcctctgcaactgacagggttcttccactgtgaaacaagagggttgtatataggttgcgtttaactaacagagttaattaaacctttttactttaaaaattactcagtcttgggccaggcgcggtggctcacgcctgtaatcccagcactttgggaggccgaggcaggcggatcacgatgtcaggagatcgagaccatcctggctaacacagtgaaaccccgtctctactaaaaatacaaaaattagctgggcgtggtggcaggcacctgtaatcccagctactcaggaggctgaggcaggagaatcacttgagcccaggagttggagattgtggcgagccgagattgcgccattgcactacagcctgggcaacaagagtgaaactccatcttttttttttttttttttttttttgacacagagtcttgcactgtcacccaggctggagtgcagtggtgtgatctcagctcactgcaagctctgcctcccaggttcacaccattctcctgcctcagcctcccgagtagctgggactacaggtgtccgccacgacgcccagctaagtttttgtatttttagtagagacggggtttcaccgtgttaaccaggatggtctcgatctcctgacctcatgatctgcccgcctcggcctcccaaagtgctgggattacaggcatgaaccactgtgcctggccactccatcttaaacaaatttaaaaaatagtttatctctctattttttaatttactgttgtttgtgggggttttgaagatgtatcaatgattttggttgagtagggcactttagctttacttctgagtgcatgcagcagtaaagttttttttttatgatttccttggctttaaacagttcaagtggttttctcaagtgtgttagggtgcacactgttagttattagtggaggttttggtaaagttgtgctgggaacagaatgccagatgagcttgtcttcaggcttcagcagtactggtggtgagctatgtatgtttatccttgtactttgcggtgctgaatgttggtacctgtgttggcagttctaggcaggccgattcttgggcctctggttggctttcttagatgctggttgtgatagcagtgtaccaagcatgtgagtgcactcttgagcccctgggctgctggtgtggcatccgtgatggtggtggcagtggtgcgaaactcttctgggtcgcacttgctgtgctcattagcagtggttgcagcgggctctgtgggccagccactagaccagcagatggcgcttgtaggcaggagatggctgaagtgggtgcagtagggtatttaggcctaacctcagcgccctaggagtgctcaggtgtttcacttggtggactaggttgtgcaatctctgggggattttaaaagtttattttgcaattgagaatgggatgtttagaatttttgtctcctactgattaaaggtagagtatggggaaaaaaacaggcaaaactaggagtttaaagaaaaggagagagaagaaaaagaaatgaagatacaataatacagaaagaacagagggaaaaactttatttatatttaatacctatgatgtgacatgcccggagttaggagcattcataagcaccatctcatattatcctccaactaagctactcatgtcagaaaaaattaaaattaacaaaggtcaacagggagtaagaaatagaaaatggaaaggaaacaattttggagtgagacctacaaaatgatctcagaatttaccctctgataagtctttctttgatcccagagtgcacaaaatgttacatgaaaaaacaaattaatataattacatctaaatttcaagctttctatttcataaagattatgagtcaaaactgagtgagttcagggactcagagaagacatttaaaatatctaaatgtgcccagttttacggttttaggcatgcgagttttagatttttttgcttttttattgagacagggtctctttcacctaggatggagtgtagtggcgtgatcttcactcacagtagcctccacctctcaggttcaagcaatcctcccattcagcctccccagtagctgggactacaagtgcgcactaccatgcttggctaatttttaacttttttggtagagacggggatctcactatactgcccaggctggtctcgaactcctagactcaaatgatccttccacctccacctttcaaagtactgggattacaggcatgagccactgtgcccagccaaagtttcagattcttcttaaaggaataaagtcagagatcttagaaatgaactaaagcacgagcatacaataaacaagagagaaaaatcagatggttatcaagaatatgaatggatattcaaactcggtgtcagagaaatgcaaattagatattattgcatgttactttaagttctataaattactatactatggaaagaaatatggggtgatgtagctgcaatcatgtatatttcatggaagagtcaaagactgtagcagtttcataaagcaatctgcacaggtactgtaaaaaaaatgattttctagaatatcatgtgacacagaaagcctgtttctggtatatctctcagtcaagtccataaattcttatgtgagagaagttttctcacaatactgttcaaggcagcagggacatggagacaatatgttgtagcattaagtgtaagaggaggaccaaagacatctatgagtgaagtagaagactgaatgtccacactaaagtacaacagggcagttactagcatttaagtagactttgacacaggagtatatatacatattaaacacacattttgagtaccaacaaagggagaaagaagtctatagtacagtacaattaaactacacaaaaagtaacagtgctcctctttctaaaacacatgtaaatacaaaaacacacaacagacctttagaattgttgtctacaagtggtggggtgatgaagtgtgaggaacaggaatgagtggaaacacgtcggaacattgaacaagacgaggtccttgtggggacataaggagagaatgtccactcactgtccagagcctcctgggccattgtcaccatacagccgctcattacatgaaagtggaatttcaaaaggtagcgaaacacctaataaaatatgttgaaagggctgggcatggtggctcatgcctgtaatcccagcactttgggaggccaagccgggtggatcatgaggtcaggagttcaagaccagcctggccaacatggtgaaaccctgtctctactaaaaatacaaaaattagccaggtgtggtggtgcacacctgtagtcccagctactcgggagctgaggcaggagaattgcttgaacccaggaggcagaggttgcagtgagctgagatcgtgtgactgcactccagcctgggcaacagagcgagactctctctctctccctctctccatatatatatatatatatacatacacatacacaaagatatgtggcctgtcaccaagtgttagatggatgtttgggccaggcgaggtggctcatgcctgtaatcccagcactttgggaggctgaggcgggtggatcacctgaggccaggagttcaagaccagcctggccaacatggtgaaaccccgtctctactaaaagtacaaaaatcagccaggcgtggtggccatgcctgtaatcccagctactcaggaggctgaggcaggagaatcgcctgaacctgggaggcagaggttgccgtgagccgagatcgtgccattgcactccagcctgggcgacagagagagactctatctcaaaaaaagaaaaaaaaagtttgtttagtttctgttggtaaatatctagaaatagaattgtaggatggtagggatgtattgttggtaaatgattaacatgtttttaattttcagttttttcagagacggggatctcactatattgcccaaactggttttgaacttatgaactcaagtaatcctcccgtcttaacttccatgtagctggcactactgaacagctttaactcttccagaccttcagttgggtggttttttcttttcctttcgtttccttctttctctctccttccttccttctttttgtaatttgataaaccaaatttcaagactttggccaaaaaacagtcttctcctttactgaatatctcagtgctccattttatttttccctcaccaattctgcaggagagatcacaagactatgtccatatctttatttgtgggggtatgattttcagctaacatagctgctaagtgatttaatttacaattatagtggtagaaaaatagctctaacttctgaggttttgtaatttattgtaaaaagcggaatacaggacatttaaagtgacctgacaaggtcaatacaggactgaggactaattcattaaatacgtcttacgtgtcttagaggaccacagacagctagcaaccctactcctaatgtgtcccatgcacttagtattgtacctggcatcgaatgagtgttcatcaaatatgttagagtaataaatacgacagcacagtttccctattcagctttacttttctggtaactcttttaatatatagtctttacctctcccttcaagctgttaatgcacaatgttttcaagtttgaaaaagaatcagattttggacaccaaacttgagtgtgtccaaggttccaggacaaccttagcttttttcctcctatcacaaatatgtttctctataactatttttgccactttctttggatatctacataatcgtcattaatagtttcagtaatagccatttcacaagagttattcagagacaatttcaactccctgtgcagacactgttgatacaatttcaggcgaaatgataaatcactttccactaatgagatgagatcatgcattcccaaacctttatctcaggagtaagatgctttctttgcacaagggctttgactggtggaaggccacactattctggcagataatggtagataagtcgcttttccttttcagttaggtttcagtctcttaaaataagtggaaaatatctcagatataaagtaataagtatcatgtgaataaagtgttgctgggtaggctgaaagacaataactgattattcagaaaggaaagatattactcctcaaactccccatcatgccatgtctgggtcttttcaatgtgcccagcagagcacattgaagatcataaaacagtctccagagcttcgttctgtgtgtatttggcaagcacaaaagagctgaccgctatgcgtggaagaccagttctttatggttggccatgttccttcggatgttcgtcttttgggaacttgctgtgctttacagaatctgaaaggacaggtctctgaaacatttctctgacttgttctagactgccttccgggaaaatctggatgcttgccgtttaaaagccaatgaagcccctccacgtccttggagccccgcaactgcatttctcaaagcctcaggaggatcctcctggctttcatcctgaacgcgagttaacttaagttcagaagcggggcaggcagtggcctgggaactacattacccaaaagacacagcggcggacacaagcagcgagtgtagccaatgaaggcctagcagagcggcgtctacgggggttcgcaatgcgtgtgggcgggacttcctgcaacgcctcctggggttgtcaatatggctgcgttgggatctgttcaccttcaggctgagtcgagactgaggtgaaaaagcggaaaaacgcgagaaaaggtttccccgttgtacagaggctagagtgaggctcggttgaatcggttgcaggcgttggtgcctctgtcagcgtccaggtcactgccgctcccgccccgctcttccctggctgtgctggcggaggctgcgccgatgaacctgactgaggtgggtgccgcgtcccagggcgccccgcccgatccctcctccgagtgccgaagccccgaggaggggccctgcaggtcaggcccctgtgtcccaaagagaggagcgttcttgtgtggggtaccggtgtccgcggtgctgtgaggcgggggagctcctgtcagggacctgcacgtgcgaggcttagaggtgctgcagagcgggcggcactggggagcccgagcgtctttgtctccacggagctgagggtgaggcggagtctcgcctgggagggcagcggagctgctgaaagccgtagaaggctgtgcaggaagggttatgcccagaggtagacgtttaaagttgggaaaaacaggatgttaaaccaggacaaggggaccgctgaggagaccccttgagttatggtagggatgggccagaggggttgcagtagaggggaagtgtgatgagattctggatggatctcagagatagagtcgacaggatttcctgctgcatcaaatgtagcagtgagggtagtgaagggtctattccatggattttgttttggcctgaaaatctgaaagaatggagttggagaagtcagcttagggagcaggtttcagagaggattatgagttgcattttggagggctgagttttggagggcagatcatgggtgggtccataagcctgacgctacctttagaaaggcgcagacctgtcataggagggattctggctcatatctgcaaaaacggagttctgaatgggttaaggaactggcctaggctggagactgaggtgtgaggtggtttagatttctgcacctgcagacccagcagccccccaggcccactctgtggaacaataggaaggtcatccagactagtggggacattgggtccagacgggggtagggctttctcacatctagtcaagggcctccagcaagcttccagcaactgaatttgtagcaggcaggcctggttgctgatgggaccagtaactgacctgcttgcttatcccctccctgcaacttatttatttatgaatgtgtaaaacattttttttttttttgagacagagtctcgctccatcgcccaggttggagtgcagtggcgcgatctcggctcactgcaagctccgcctcccgagttcaagcaattctcctgcctcagcctcccgagtagctgggactacaagtgcccgccaccacgccaggctaattttttgcatttttagtagagacggggtttcaccgtgttagctagtatggtctctatctcctgacctcatgatctgcacgcctcagcctcccaaagtgctgggattacaggcatgagccaccgcgcccggccgaatgtataaaacatttatttaaccactaatgaaccagtatccttctaaatatgtacacataggtcggcagttagaaatgaatgtaaccaatagttaaatttattcacttaataattgttgaatgttgatttttcttttttctttttttttttgagacggagtctcgctctgtcgccaggctggagtgcagtggcgtggtctcggctcactgcaacctctgcctcccgggttcaagcgattctcctacctcagcctcccgagtagctgggattacagacatgcgccaccatgcccatctaatttttgtatttttgatagagacagggtttcaccatggttggccaggatggtcttgatctctgcacctcgtgatccgcccacctcggcctcccaaagtgctgggattagaggcttgagccaccatgcccggctgaatgttaatttttctatttgcttgcaatggaaagttttatgtatcacatttccttaacaccgtaagaagtgggaaaaatacacacccaaaatttcaaaacccttccatgtcatttgtaccgaaaacatgtaaaaaatatttaatccagtagaaagaaattgctgatacatagtgtgtactacttatatttgatgcccatataagccctattagttggcaatccttttaatctctattttacacataagggcaccgagacttaaggaagttcagtcctcatcaagacactgaaccctgaggacttactgtgtaccctcagataactttgctctagttgcagggccagaggtggttgtacagtcagcctgtaggatgctgcaatgctgtcttaatcctcatggcctgcctcttcccacagggttcatagcagtggcagcaatgcttatggatgctggacaggtgagtggagagtgtttccagctttcacccatcccagatggtttcagcatgctgatatagggaatggtgttatcctgagactgttcaccttttcttctctctcccttgggtccaaggagagcctgtagttccaccagacctgggttccaaactcagtgcctggttatatagagtggttctagttctcacaactgatggtttgagatttggcaaggcatctcaaacacaggatctagaatgttcaaatgcttggtggtgagacttagatgggatgcttagagaactgtagcttaatgttctagctggcaaggataaggagcacagcagcagggcaggaggtcggggcatgcagggatcaggcatggaatggcagcctgaggttgtctaggtttttgtttttgttttgttttgtttttgagacagaatcttgctctgtctccaggctggagtgcagtggcgcgatctcagctcactacaacctccgccttcctggttcaagcgattctcctgccccggcctcccgagtagctgggattataggcacccgccaccatgcccggctaatttttgtattttttagtagagatggggtttcaccatgttggccaggatgttctcaatctcttgacctcgtgatctgcctgcctcggccctcccaaggtgctgggattacaggcttgagccaccacacctggccttgtttttttttttttttccagacagaggctaactctgtcgcccaggcgggagtgcattgatgtgatctcggatcattgcgacctctgtctcccaggttcaagcaattctcctgcctcagccttccaagtagctgggattacaggcatgaaccaacacacccagctaatttttgtatttttagtagagacaggatttcaccatgttggccaggctggtctcgaactcctggcctcaagtgatctgcctgcctcagcctcccaaagtgctgggattacaggtatgagccaccgtgcccagtggttctaggtctttaatctgaggggggtagtagctagggaaggtttgagaaagaaaaaagaggtgatttgacctagattctttttttttttttttgagacggagtctccctctgtcgcccaggccagagtgcagtggcgtgaactcggctcactgcaagcttcgcttcctgggttcacgccattctcctgcctcagcctcccaagtagctgggattacaggcacctgccatcatgcccggctaacttttttttgtattttttagtagagccagggtttcaccgtgttaggatggtctcgatctcctgacctcatgatctgcccgcctcagcctcccaaagtgctggaattacaggcctgagccactgcacccagccagatttgacctagattctaagaggcttcctctgcctgcagaatggaggacagagtgagagttagggaagaaccaaggatacctgggtgataattcctgccacagtccagtggaggttggtggtggctggacacgagtggcggctgtggaggtgggaggggtgggtggcttctgtaggttttgatctagagctgctcacattttttgatgtacagagcgaggaagctcgggaggtaggatgcaagagggagtcaggaatggccccattgttttggccttgttgagaaggttggatgttccagcaactaagatgtggtaaattttgtagtagggggagtttaatagagcatatgaagaacgaggtttgggctaagtcaaaaatgttccagagactcgagtagaggtgccagactggcagttgaacacacaggaatggagttcaatggaggtgttcaggatggagacatctactatatgatagccagcgtgtacaccatggtaaatctgtgggtcagatttaggaatagacatctttagattctggaggcaatgctgttagggagaaggaaggggaaggaaggggctgaggactggatctttctgttgggcacctggatggggttgctgggcatcacaaagacagatgagggagtggatggactgaggatatgtgtgtgtgtatttgtgtgtttatgttggagatggcctttggaaaataaaggcttttgagggggagagtgcacataaaagttggatggtgaggcatctccacaaaagaggtgagatgatagtgaggtctgggaggggcttagtaccctattatggactcaacagggttttgtggcaaatattggttgtacctgggtagtttcacgcgaactctgagactattttggcagaagatgggatcatctagaagcattgctagtcctggggtggggatggtgttggggaggtcagtgtatctgggctttggattagagttgggggatagagaaagtcgtgactgcttatgggacaacatatacatgtagaagggggagacagccaagatctggaactcaaaggaggtgtgcaagaatatgtgggtttggaaagctgaggtcaaagaaagaaacaggattgggttgggagacgttcaaagcaatgtttcctaaacattgcattctggtcattctaggggcaaatacgattctggttgcatttgtcatgcactgcaggatttcatgtgcagagtggcatggtaacacgccatggaaatactcccagttgggctgtggtggttgttagtgttgccaagagtggaggtgttggatacatgagggaggtgccatccaaagcctgagtggaggagcatgaatagatggttccacctctggcactgggcacttaagggaggagggtgagtccaagtttggttatctgagaggcaagatctgggtgactctagggaaattgagtgacaaaagaaaggtaggcccccatgtgccaggtgttttttttgttttgttttgttttttgagatggagtctagctctgttgcccaggatggagtgcagtggcgcgatctcggctcactgcaacctctgcctcccaggttcaagcagtactctgcctcagcctcccgagtagctgggattacaggtgcctgccaccatgcccggctaatttttgtatttttagtagagatggggttttactatcttggccaggcaggtcttgaactcctaaccttgtgatctacctgcctcagcctcccaaagtgctgggattagaggcatgagccaccatgcccggccatgtgccaggttttgatggcgcttttcagtctctttcccccacccatctttgttctatactggagtcagtgatcagtggcaatgaggggagagcaggtacaggtgccatgaagacctagtgtctcttcctccttcagaagtgggtggaggctagcagggtgtggatgtgtgtgggtgtggtgaggagcactgaaggtcctggagagggaagtgtatcagtgattgtacccacaggatttcaatctgtgaacaagagtgagtgattacagaaaagccaatgacattgaaataattttttttttcaattggtgagaaatcatacctggatgaaatgatttttattcctttcatttcctgagtgcagggagcatgccacatcacataaagccacagaggaaatagcggatttggtcaggtggcagatgcacagttgaagggagagcatatatcagtggctttattggggttttggctggaaaggcatgcaggggagagtgaagagcttaagactgggtagtttgcatgattttggcagccttggggtatagggactatccctccttttgtggtacaagccttgtgttgatttagggcaggagaaagaatcatgtgtgattgttagataggaggcagttcagtctatgggatctggattataagagaaatgttaaaatgctggttgttattttggtcctctaattcttagatttcaagtagataaatacagatctaaggaaacagaataagaagttgctcatgggccgggcgtggtggctcatgcctgtaatcccagcaatttgggaggccaaggcaggcagttcacgaggtcaggagttctagaccagcctgaacaacatggtgaaaccccatctctactaaaaatacaaaaattagccagtcatggtggcacgcgcctgtaatcccagctactcaggaggctgaggcaggagaatcacttgaatccgggaggcggagcttgcagtgagccgagatcacaccactgcactccagcctggcaacagagcgagactccatctcaaaaaaaaaaaaaaaaagaaagaaaaaaaaagttgctcacagactaaactgttataattttggcaggattatatggtttttgaggacgtggccatacatttctcccaggaggagtggggaattcttaatgacgttcagagacacctgcacagcgatgtgatgctggagaactttgcacttttgtcctcagtaggtaaggccctgacacctacgtcagtgtcttgtgctgggcaatgttttttcacttttttccttggcatctccgtctcacaccaggtcatggatgctgcatcctctcctggtttcctggcatatgtgttgtggcagctacagctgggctgtgtgatctgtatcaattttccttaagaagcttagctcttgtcactctgaagccttataaggctcaaaagtcagaagtcctcaggtttctcaagaatatcctaatgaccttgcctgtccctggttagtttactctgtccaaatgcatgacactttctctgtgcaaggctttctccattcttcttgctgacatagggataccctgtgtcaggaatttcagggacctacctcgtcactgcttgtgaggactgtgggcttatttctgcaggactctccactagaagttctggtaactttagaatacagcatgtcctgggtttattgctctgtgtacatgctgttgacaccctccctttccctgtctttcccctagcttggctaacgccacacctagatagttgctcaccttgagcaaggtagaggtccctgggtgcctgacagagtggacattactccattgaaggcaagagatgctcaaaaggacttggccctggtggatgggagctcagaaggggtgtgatgacagggctgggttcacatcacactgggaatcaatccagtttgatgcccctgccagtggccacaccgcatgtctctcttttcttccctattgtgatctctcttttgactttcatctcctggctcccacctctgaccctacgtctctggcctccacctctcacctgttcccgttttttgttttttttttgtttttgtttttgtttttgagatggagtttcgctcttgcaatggtgcgcgcgatcttgactcactgcaacctctgcttcccgggttcaagcgattcttctgcctcagcatcccaaatagctgggattacaggcatgcgccaccacacctggctaattttgtatttttagtagagacggtgtttctccatgttggtcaggctggtctcgaactcctgacctcagctgatccgcctgccttggcctcccaaagttctgggattataggtgtgagccactgcacccagccacctgttccttttactgttccctttgtagtgccctcaacatatgacctgtacttaaggtgttgtgaggtctggatgtatatatttcagcagtccctgaacaccagctctactgtcacatcagatctctctgggtctggacacagtcttctacacattgttcaccagaagctatggcctgttgaaagccattcactgaggagtaacttggggactccacttctgtgctctgcactgtaccactccctatgttgttccccatcatcaggactctttcgttatgggtttctgtcagtcccggttctgcccagtaggctttcctctcactggctttaatgtcccatgcctgtcaccaatcccatggtcttatttgtgagttggtctgacagacatttgttatggggctgcctcttccctccaaagtcatcatgcacttcatgagcatttctgttttaggttgttggcatggagccaaggatgaggaggcaccttccaagcaatgtgtttctgtaggagtgtcacaggtcacaactttaaagccagctttgtccacccagaaggcccagccctgtgagacatgtagctcacttctgaaggacattctacacctggctgagcatgacggaacacaccccaagcgtacagccaagctttacctgcaccaaaaggagcatcttagagagaagctcaccagaagtgatgaagggaggccttcgtttgtgaatgacagtgttcacctggcaaagaggaacctcacatgcatgcagggtggcaaggattttactggtgattcagatcttcaacaacaggctcttcacagtgggtggaagccacacagggacactcatggtgtggaggcctttcaaagtggacagaataattacagctgcacccaatgtgggaaagacttttgccaccaacatacactgtttgagcaccagaaaatccacacagaggaaaggccttatgagtgcagtgaatgtggcaaattgtttaggtacaactccgaccttattaaacatcagcgaaatcatactggagaaaggccttataagtgtagtgaatgtggaaaagccttcagcctcaaatacaatgttgttcaacaccagaaaattcacactggagaaaggccttatgagtgcagtgaatgtgggaaagcttttcttagaaagtctcacctacttcagcaccagaggattcacaccaggccaaggccttatgtgtgtagtgaatgtgggaaggccttccttacacaggctcaccttgttggtcaccagaaaattcatactggagaacggccttatggatgcaatgaatgtgggaaatactttatgtacagttcagcactcattagacatcagaaagttcacactggagaaaggcctttttattgctgtgaatgtgggaaattctttatggacagctgcacactcattattcaccagagagttcatactggagaaaaaccttatgaatgcaacgaatgtgggaaattctttagataccgttccacactcattagacatcagaaagttcacactggagaaaagccttatgagtgtagtgaatgtgggaagttctttatggacacttccacactcattattcatcagagagttcatactggagaaaagccttatgaatgcaacaaatgtgggaaattctttaggtattgcttcacactgaatagacatcagagagttcactctggagagaggccttatgaatgcagtgaatgtggcaaattctttgtggacagctgtacactgaagagtcatcagagagttcacactggagaaagaccttttgaatgcagcatttgtgggaaatcctttagatgtcgctccacacttgatacacatcagagaattcacactggtgaaaggccttatgagtgtagtgaatgtgggaaattctttaggcacaactcaaatcatattagacatcggagaaatcactttggagaaaggtcttttgagtgcactgagtgtgggagagtttttagccaaaattcccacctcattcggcaccaaaaagttcacactagggaaagaacttacaaatgcagcaaatgtgggaaattttttatggacagctccacactcattagtcatgagagagttcatactggagaaaagccttatgagtgcagtgaatgtgggaaagtctttagatacaactccagcctcattaaacatcggagaattcacactggagagagaccttatcagtgcagtgaatgtggaagagtctttaaccaaaattctcatctcattcagcaccagaaagttcacaccagataaagaatgtatatataaagcagatggggaaagacttcacacagaaatctactctgatttagcactgggacctacgttttaaaaaaagtattcttgtagaatacagataacataaaatctaacatcttaaccatgttaaagtgtatagttcagtactgttaagtcattcacattgtgcaatgaatatctagaagtcttttcaacttatgaaactaagtctataccttttaaaaccttattcctcactccatccagcctcttgacaagcaccgctctgtatgaattttactagtccgggtacctcatataagaaaacttaagttttggtcttcttgtggtttattttgtggcttattttgcttaacgttatatttttaaggtttcatgttctaatccattagaatttccatcctttttaaaggctgaataaaattctgttagtcatgtgttgcttaacagtggggaagtgtcctgagaaaagtgttattaggtgattttctttctttttttggtggtgggggggttgcgtgaatgcctaggctgtatggtatatcctatagcaccttgctacaaacttgtatagcatattactgtactgaatactgtaggctgttggaacacatggtaagtaattgtttttaagtatatctaaacagaaaaggtacagtaaaaatacagtataaaagaaaaaatgatagactcacagagaacttaccatgaatgaagcttacagtactgcaagttgctctaggtgagtcagtgagtggtaagtgaatgtgaaggcctaggttgttactgtgctgtagactttatagacattgtgtacttagacgacaatacatttttatttttattattatttttgagacagaatcttgctctgttgcccagactagagtgcagtggtgcaatcttggcttcctgcaacctcctccacctcctggttcaagcagttctgcctcagcttcccaagtgtctgggattacaggcatgcaccaccatgccccgctaatttttgtatttttagtagagaacggggtcttaccatgttggccaggctggtctcaaactcccgacctcaagtgagccactcgctttggcctcccaaagtgctgggattacaggcatgagccaccgtgcccggctggacaaaattaaatttatagaaatttttctttaatatattaaccttagctgaccattttttactttataagcttgtatttttaaaaactttttgacttttgtaataatgttttgcttaaaacattgtacaactgtacaaaaatattttttatatcctaacttcttaaattttttttgttaaaaactaagatacacacatttgtctaggccggcacaggatcaggataatgtcattttattccaccttcacaacctgttccagaagatcttctgggacagtaacacacatggagctgtcatctaaaataacaatgcctttttctggaatacctcctgaaggacctgcccgaggctgtgttacagtttgtgtgtatgtacacctgtatatttatagacatacacacaactccatatatactctactgttggagaacacctaatgataaaaagtgtagtatgctaagaacataagctagtaactcgtaagttttatctactgtacattattgtatatgttatacttctatatgactggcctcacagtaggtttgtttataccagcatcaccatgaatatgtgattaatatattgccttactactgctatcatgtcattaggcaataagcatttttcagcttcattgtaattttatggaaccactgtcatgaatgtggcccattgttgactgaaaagtgaggtgcatgattatatatgtatgtgccacttttcctttcattagtggacatttgggttgtttccactcagctgttgttaatagcagatgagcatgaatgtacaaatgtttctttgaggctgtgctttaaattccttttgaggatttactcagaagtagaattggtgctttctatgttttttttttgtttgtttgtttgtttgtttgttttttgagacgggagtctcgctctgtcgccaggctggagtacagtggcctgatctcagctcactgcagcctctgcctccggggttcaagcagttctcctgcctcagcctcccaagtagctgggactacaggcatgcaccaccatgcccagataatttttgtatgtttagttgagacggggtttcaccgtgttggcaaggatggtctcaatctcgacctcatgatccactcacctgtccccctatgttcatttaaaaaatatttttaattttttaaatttctgactcacaatgttcccattctatgttaattctgttttaaaatttttgaggactcttctatagcagctgcatcattttttaatttaactttattattaatttttttttttagtagttttactgggttgagttttttttttttctttagggttatttggttttgagatgtaggagttttttagtatatgtggggacttcagaaagtttgtggaaacatgaaagtaaaggatacaaaaagaaaacaagttttatttctcaacataagctccatcaagttcaagacaattttataagtgatgataccaggcatttagtccatccctaaagaagtgaggttcctgggaatttaaccttgtctatgcaatcttttttaatattaactaaagaaaaatgggtgccctttaaagattttttaaaagtaggaaacaagaagtcagaaggagccaaatccggactgtaaggtggatgccttagggttatcagaattcttgtaaagttgcagttatttgatgagaggaatgagcaggagcattgaagtgaaggactcctggtgaagctttcccatgggttttctgctaaagctttagctaactttctcaaaacactctcattgcgggcgccgtggctcacgtctgtaatcccagcaatttgggaggccgagttgggcggatcatctgagctcaggagtttgagaccagcctgaccaacatggagaaacccccctctctactaaaaaatacaaaaattagcctggcgaggtggtgcatgcctgtaatcccagctactcaggaggctgaggcaggagaatcgcttgaacccgggaggcggaggtggcagtgagccgagatcacaccattgcactccagcctgggcaacaagagtgaaactccatctcaaatagtaattaataataaagccatgtttcatctgtacaattcttcaaagaaatgcttcagcatcttgatcctacttgtttaacatttacattgaaggttctgctcttgtctgcagctgatctggattcagtggctttggcacccattgagtggaaagttcgcacaactttaatttttcagtcagaattgtgtaagctgaaccaattcagatgtctgtggtgtcagttactgtttctgctgttaatcatcagtcttcttcaataaggtcatgagcaagatgaatttcttcctcgcaaattgttattaatggtttgccattgtgggctgcgtggtcaacatcatctcatctcttcttaaaacgttatcaggccgggcgcggtggctcacgcctgtaatcccagcactttgggaggccgaggctggtggatcatgaggtcaggagatcgagactatcctggctaacacagtgaaaccccgtctctactaaaaatacaaaaaattagccgggcgtggtggcgggcgcctgtactcccagctactccggaggctgaggcaggagaatggcgtgaacccgggaggcggaggttgcagtgagtggagatcgtgccactgcactccagcatgggcgacagagtgagactccgtctaaaaaaaaagaaaacaggttatcagtttgtaaactctgatttctctgggtcattgtgcccataaacttttctttttcttttttttgagacggagtctcactctgtcgtctgggctggagtgcagtggcgcgatctcagctcactgcaacctccgtttcctgggttcaagcgattcttctgcttcagcctcctgtgtagctgggattacaggcatgcgccaccacgcccggctaatttttgtatttttagtagtgatggggtttcaccatattggtcagaatggtcttgaactcctgaccttgtgatccgcccaaactcggcctcccaaagtgctgggattacaggcgcgagccaccgcacccggccggttttaccatttttagagccaagctttactatatatttgatatttgttctttcttcaaccttagctgaattcacattcctctgatagaaggtgttttcaaactgatgccgttcttagtgcctcaaactagatcctgttcatacttgttagaacaagttattacaaattcactttggtgtaaaaaattgaaatccatacataatttttttttttttttttgacagagtctcactaacgctaggttggagtgcagtggcatgatctcggctcattgcaacctccgcctcctgggttcaagcaattctcctgcctcagcctcttgagtagctgggattacaggtgcccacaatcacgcccagctaatttttgtatttttagtagagatgggttttcactctgttggccaggctgctctcgaactcctgacctcaggtgatccacctgcctgggcctcacaaagtgctgtgattacaggcttaagccaccacccctggccaattttttcataatatacatttttttctcatttttcatgaaacttttgaagacccctcatattctagatattccttctcagatatgtggttttcaaatactttctcccattgagtctttttccttttcactctgtccattatgtccttttttacacaggaattttgaatttaaatggagtctaatatatctgttttataagtctttgatgcatttgagttcattttagcaacttaattcttttgcgtgtggatatccagttttttttttttaacatcaaaagaataatgtttttgcctagcattaaggcccttggtagaggcttgtcagttacaattttggagcagcagattaagtccacactcccaaccattttccttatcaggctctcaaactctgggccacaatatgtaagacccaatcaccccaggatcaggaatcagatatctagggacagcttctgtgcccaggagcttgtaaaattattccattggtcaatgcacaggggtccctgaaaacctagctaaccccaatttacatggcacacacaagctgccccctaagctccagcttgctgttatcttgggttccctcataactcttgcagccctgcctatgtccttaggtttcaagctgtaagtagcaaagtggtctacattttatgattatcattgtgacatgtcctgacatcagaaaaacacctttgtatgttattactatacaaccagcagaatattatgagtgcagcaaatgttagaaagtattcagcctaacttcactgagcaagagtaagttcatcctggagaaagtccttaggaatgcaggcaatatactttttttcctttgtcaacaggtcaaaaacagcaaagctctatcgagcttgtcttactcaccctatttttttgttgctctgttttgttttaggcttttagcctgaagccatggttttgtttctgtctctagtggtaggtggacaagaggaatgagatgagaaaggagctttactggcccagctagaaacaaactaagaacccatgactgtattctttcccttggatgaccctgtgttagcttgttgagggagatctcagcctgaaattgaatctcacatccaaacatccacgcaagggagatttgttgtaattgtcagatatatggtaaatttttgtgaatgatgttgcactttctgaccctgcctggggcctttccagagttaagttgctgaaagtgtgcattacagaagactcctgctattagctgtcatggtgccacaatgtgcatcaccttagtcaccttaaattacttagagagtgataaggtctggacttctggttaaatgtttttaaaaaatggggggtgggggggtggtgcatagattgctgtgttctctacctttatctggaatattcagtcatttgttccctttgggggcctcattcccagtcccctgactggtttgggtgtggacatcacccagctttggacagagaacacacgccaacttcagctggcagcttgtagagatttccttttttcagaggtattattagttgtctgatactgataatgttgatgataaattttctaccttccaagcttcccaacccagtcaatttccacctaagcattgctgttttcttctgatgataaaggtcatattgtttaagctacatttactcttggggttctcttcactgtgtgctgcgggttgagaacaaaattaggctttgccagaatgaaaaagtgaatggtttttggggccttcaactttttgtgctcttgaagaaataagaagacaaaatagctttcaatccacatcaggcccaatttgcattgcttcgggagttcctgggaaagtgacggacttctatccaaaatcgcgccgtgaatttgattattggtagttctacagtcagcttgagggttgttggtttgacagttgtcagagcatgttgcagctgtatgaggtgggtatctgtacatatggatgtcccatattctccagcattgcataggaatagctggtgtctagatcctgcctcaggagctatgtgtcctgaatttaaaaatcaggtatgttatatccctggggcatgtcagacatacaacaacagtgcattagtccattttccattgcttacaacaaaataccttaaactgggtaatttgtaaagaaaataaatttcttactgttgttttgttgtgctttcttttttttttttttttttttgtttactttgtttttagagacaggatctcactctgtcccctaagctggagtacagtggcatgatcatagctcactgccacctggaacccctgggctcaagtgatcctcctgcctcagcctctcaagtagctgggactacaggtgagcaccaccacacttggctactgttattattattttgacaagatttaatgtagaaagtatagcacctgttatctaccaggaatagatgaggatgatcaggtacatttatgtttgaatctgagcgtttaagtgtatgggaagatattagacactacctttcctcataagacactcagtgatctgaattgaggaacttctagtttttgctctcccacttcttggaaacccctatctactttcctatgtatttgactacttgaggtagcttatacaagtagaatcatacaaatgtattgttttgtgactagcttacttcacttacaataagtcctcaagttcttccatgttgctgtgtgtgtcaaaatttccttccttgctaaggctgaataatattccattgtatatatattttctttatccagtcattcatcaatgaatacttttttttgtgtgtgtgtgtggtagagtttcgctcttgttgcccaggctggagtgcaatggcgatctcagctcactgcaacctccacctcctgggttcaagcgattctcctgccttagcctcctgagtagctgggattacaggtgcccaccaacacgcctggctaattttttgtatttttagtagagatggggttttgccatattggccgggctggtctcgaactcctgacctcaggtgatctgcctgcctcggcctcccaaagtactgggattacaggcgtgagccactgcacccagccacatcaatcaacactttgattgtctccacattctggctactgtgaacatgggtgtggaactatcttcatgaagccctactttaatttctttttgtatatacccagaagtaaaattgctggatcacatataattctattttaaaattttttcttagttttaaattatcttttggagacagggtattgctctgtacccaggctggagtaagtggcacagtcacagttcactgcatccttgacatcctgggctcaagagatcctcctgcctcagatttccaagtagctaggactaaaagtgtgccaccaccatgcctggtgaattttttttattttttattttttgaggcaggtcttcctctggcactcaggctggagtggtgcagtggtgtaatctcagcttaccacagtccaataccaggttcaagtgatcctcctacctcagcctcctgagtagctgagaccacaggtgcacagccaccatggtggctgcatcattttacattcttatcaaaaggcacatgtttctaatttttccacatccttgacaacacttgttgtgttcttctgtttcttttaattgtagctactctgttcgaatggattttgattgaaaacatttgaggtatggcttttaggagacttgatcttaatttcctagcctttttgacctatagttttattgtggtttattgtggaaaaaggtgccctgtagctgcctatccaggtcagtctaatcacctttcatcattcaggatttatcatctgaggttcacaccaacatgtatacaagtggcatgtcttagtctgttttgtgcttctataacagaataccacaggctgggtaatttacaaagaagagacatttattggctcgtagtttggaggctgggaagtccaataccaagatactagcatctggtgagggccttctcgctgcatcataacatgacagaagccatcaaatggtagaagagcaaagagacagcaagagggaataagaacccattcttgcgatgatagcattagtccacctatgagggtggagccctcatgatctgaagcctcttaaaggttccacctcttaatattgttacagtggcaattagatttcagcatgagtttggagaagacaaaggtttaaaccataacatggtgtaagtcacataactctgggtcatatgcatatgaaagaattcgaaatttctctatgaacacatgctagtcttatttgggtttagagaaatctttagttgcagctgttaattcatcctgggtccaaggtttacatctgacagttgcctacatacttggctcttgaaagcatagatctttagaggtaattggcattttggaattttaggatattttttgggaaaataaagggggcctgggcaaaggatagaagagggaggaggtgcagaaggagaaagattaggcagggtacggtggctcacgcctgtaatcccagcactttgggaggccaaggtgggcagatcacgaggtcaggagattgagaccatcctggccaacatggtgaaaccccgtctttactaaaatacaaaaaattagctgggcgtgatggtgcgtgcctgtagtccctgctactcaggaggctgaggcaggggaaccacttgaacccgggaggcagagattgcagtgagccgaaattgtgccactgcactccagcctgatgacagagcaggactctgtctcaaaaaaaaaaaaaaaaaaagagaaagattagaagggtaaaggggaagtagaagagttagatataaggcagcaactagaggaataggagggggaggatattgcttaagtttgccaaattgttcaatggctttattcaaggaaatttttactgaaacaattttttattcagaaccttggagattgtacaaatacgattcattccaataaaaaactactgcttactgggcctgagaaattttgttttctttcttttctaatgcatctcttaaattaacagtttttgttttcttttcaactgaaatgttcctcctagtagccactgaaggcaaaaattatccgggtgaagttatgccacttagaaacctaaacactagaattgtgattgtaatcagagtacatataacatgcaggagactttcctggaaaggagacgatttcaatttagacgatccaataagtgctggcactgtctgagaggagtgtaatgattatgtaccttaggcctggttctacagcatgataggtggctacttccccacaagaacacgacaatcttcacacctcagcatgcagaaaatctgagaatactctttctgaatgaatgcctaattctctggacaaaaaagaaaaaaaaaaaagaaaaagaagataagagaatcttatcccattttatcagtgacccaaagcaaagtctgtccaaatggtcaccagtctgttgagaatcagaaaacccttggtctgtgatattagctgaaacaagtcactagagcctatgcttgagttttttttgtttttgtttttttaacggagtttcactcttgttgcccaggctgaagtgcaatggcgtgatcttggctcactgcaacctctgcctcctggattcaagcaattctcctgcctcagcatcccgagtagctgggattataggcgcatgcctggccaattttgtattttttagtaaagatggagtttttagtaaagatggggtttctccatgctggtcaggctgatctcgaactccggacctcaggtgatctgcctgcctcggcctcccaaaaggctgggattacaggcatgagccaccgcgcccagcctatgcttgagttttaccctattattatcctcttcatgacaatgctttaagaaagtacatcactaaactgttacatataagatagcaaaaagagatgaaaagaaatggtgtgatactatcaaggatggcaatgtcacgggagccaattaaaaaaaaaaaggaggcggggcgcggtggctcacacctataatcctagcactttgggcgtctgaggcaggcagatcacctgaggtcaggagttcgaaaccagcctggccaatgtctctactaaaaatacaaaattagccaggtgtggtggcacgagcctgtagtcccagctactcgggaggctgaggcaggagaattgcttgaacctgggaggtggaggttgcagtgagctgagatcctgccattgcactgcagcctgggcaacagagtgagactctgtcttaaaaaaaaaaaaaaaaaaaaaaaggtgggggggactaaacagagtctaaatagccaagaaacccagtgcaaagacagtagtgttcaaacttgttgctaacttaacatgtcatcatggatttgacaaggtgtgaagagcaaagcataaaggacctctgtggttactatacctgtttgatgactatggcccatggtgatgaacaggttagacgttatttcactgggacctctgtaagtatgatacattgtaacataatttctacaatggtcacatctaattatatcaatcctttgttcactgcaccttcattagtaagaagtatgcttaatggtagcattcatggactgcaaacagacaacttggaaataaatgaagacccaaatgagaacaaacatagcctattaaatcagaccacaccgtagtaaaggagtcatccacaatctcttgcactcagcagagcttgaaaggcaagcagaggtgtaaaaagcttcatagtagataaaaggtaaagtattaggtatgccatgactggaggctatagtcttgaggagtgtgtgtgtgtgtgtgtgtgtgtgtgtgtgtgtgtgtgtgtgaaggggttatttagaaggttgacatcctatgtgattggctagtgatgcactgactttctccagttggtcctaagttgaacatatgggcaacaattagaaagctgtcagttcttagtcatgtcttagccattttaagcgagttgttatgtgggatgttgtctggcttcctggccttgttgctagacatagtattctgacttgggagtggttactgtagataccacattagatttctgaatgggttggtgtagattatgggtcagagtcaatttttatatttggtgtagccgttgtccatttgtatagcaaatttctcacacctaaataaggaactatccacgttagtgggatttcttatttttaactggttatgttgaaaattagtttaatattcattaatttcccacaaccctttcaaaggtttgtttttgccagaccttcagttgggcagagttaatttttccttttttttttttttttaaactggttggcaaactaaattgtaacgctttggccaaaaaatagccctttccttttctgaatataaagagaatgggttttaatttttggtcttttctttgttcttccttcactaatcctgcagaagagaccataaggcattatccaaatcttcatttgttgggggcatggttttcaggtagtattgccaccacctgatggcaatactattgctactcaatttttctctcactgctactcaattgcagtgagagaaaaatagctctaaatgccgactttttgtagtgcattgtaaaaagctgaataaagccagggacggtgtcctgtacctacagtcccagctgctctagaggctgaggtgggaagatagctttagctcaggagctgaggccttatcataaggccttataagactacctggaggcttcatctgcatgatataaccttggtcttcacaaccccttgtctttttttgtttttgagacggagtttcgctcttgttgcacgggctggagtacaatggcgagatctcggctcaccgtaacctccgcctcccgggttcaagcgattctcctgcctcagcctcccgagtagctggcattacaggcatgtgccaccatgcccgtctaattttgtatttttagtagagatggggtttctacatgttggtcaggctggtctcgaactcccaacctcaggtgatccgcccacctcggcctcccaaagtgctgggattacaggcgtgagataccacgcccggcccacaaccccttaacccagacaaccatttctactgattccaggtctttagatacaaactctttcaaccaattgccaatcggaaaatctttgaacccacctgacctggaagccccgcccctcccttccagttgcgcctttccagaggaatccaatgtacattttacatgtattgattgatgtcttacgtcttcctaaattgttaaaaccaagctgtagatgggccaccctgggcatatgttcttaggatatcttggagccgtgtcatgggccattagtcactcatatttgtctcagaataaatctcttcaactatttcacaaagttccacccttttcgtcgacagaaagatattcctccttcaactctccatcacatcctgtgtgggtcttttctttcttgtcccaacagaagcacactaacgatcaaaaaaaagtctccagagcctcagtatgtgtgtacttgacaagcacaaaagagctgaccgctatgaatggaggaccagttcattatggtcagccatgtcgcttctgatgttcttcctttcgggacttgctgtgcttcagagaatctgaaacgacaggtctctgaaatatttctcagacttgtcctagactgctctccgggaaaatctggttacttgcagtttaggagtcagcaaagcccctccacgtccttaagagccccggaactgcatttcttaacgctcctccaggagcctccagcttttttccgtaaggtccgcgcgcccagcattgtgaggcgaggcaggcagcagcgtgggaactacattacccagaagacactgcgggcgacacaggcagcaacgtgagaactacattacccagaagacactgcgggggcagggcagcgagtgtagccattggtctagcagagagacgactaatgaggtctcaattgtgtgggcgggacttctggcggcgccctcatggttgcgttagcatggctacctagggatctgttcactgatttagagggtcccagagctctgggtcgggactgaggtgaaagagcggaaaaacgcgagaagcggtgttccttctacacagaggctagagtgcggatcggctgagtcggctgcaggcgcccctgcctccgtcagcgtccaggtgaccgccgttcccgccccgctcttccctgggtggactggaggaggccgcgccgatgaacctgaccgaggtgcgtgcagcgtcccaggccgccccgcccaacccctcctcccagtgctgaagtcccaaggagccgccctgcaggttaggcccttgtgtctctaagagaggggcgttcttgtgtggggtgcccgggactgggactgcggtgcgatgaggcgggggagctcccgtcggagaccgacacgtctctggggcttggaggcactgcagaacgggcggcactggggagcccgagcgtctttgtctccaaggagcagaggttgaggcggagtctcccctggaagggcagtggagccgcagagagccatagagggctgtgcagggaggacgaatgggagggtcacgcccagagttagaagtttaaagttggggaaaacaggatgttgaacgggggcagggggaccgctgaggagaccccttgagttatggtagggctgggccagaggggttgcagtagaggggagatgtgatgagactctggatggatctcagagatagggtcaacaggatttcctgctgcatcaaacatagctgtgagggaaagtcggtagtgaatggtgtcttccataggttttgttttggcctgaaaaatctgaaagaatggaattagagatatcagcttaaggagcgggtttcagacagaagatcctgggttggattttgggcgacatcacatgggtaggtggacgtaatttccaaaggtgagggaaggtagctggcctggagctttaaatgagttagaagttgtgcacttgagaagttggcctgtggatcagattgagaaggaagaatcctacatcgttttttcatatgggctgaggtaggggagggctcagatttggaggaaagaccatggtagggagggcatctctgatactccctgcagaagggagcagatatgggctaagagtctggtctgtttctgttgaaaaagaggcctggatggataaggagttgccctggaatacagagactgaggcatgagataattgtagtcactccacccttctaactcagctggccctgagggccactctttagggaacaagataaggccatgcagcaactgggtccaaaactgggcagggctttctcacatcctccaccacagttaagggcctccagcaagctccctttactgcattatatggcaggctgacctgtttgctgaacggaccagtaactgattgactgctcagccccatcctacaactcattaacttagggatgtaaaaacaggtaattgacttaaacagtaaggaactatatcaatcttaaataaccaagcaagtcagaatctagtttaaagagagtttattcaagttcacatgttgatgatagccatctgggaccatagattcaagttgtcctgaatatacacttcaattaccacagtgacaagtgtttgctttttttttaaggaaaaaagaagcagtttctgagttgtttaccaataacttatgttaaaataagataagtttttattggctatacattcttatttatattatagattacagaaacatgaagataataggtgagacagctagtcaggaacagaatgtcttaaaacagttgtcctcaggcataggttcagggatgtgactgacatctcatatattcttgcctctctgagcctgatacattttgtgtaggtcagacaggtctgggctatttttttttttcctcagccaatatccttctaaatatgtacacataggcaattggaaatagatgtaatcaataatttaaatgtattaaaatatttattgttagaatgttaatttacctgtaactctgcttatagtacaaagctttatatatatatcacatttccttaaaacattaagaagtgtgggctgggcacagtggctcatgcctgtaatcccagcactttgggaagcgaaggtgggcggatcacgaggtcaggagtttgagaccagcctggccaacatggtgaaactctgtctctactaaaaatacaaaaattacctgggcgtggtggcgggcgcctgtaatcccagctacttaggaggctgaggcaggagaatcgtttgaacccgggaggtggaggttccagtgagctgagattgtgccattgcactgcagcctgggcaacagggcgagacactgtctcaaaaaaaaaaaaaaaaaagggaaaaatactcaaattttcaaaacccttctactttgtgctgaaaacatgtacaaaaccattaatcctatagaaagtaatgcttatacatagtgtgtactacttatgcttcttgtcaatatgagccctgtgaagtgggaacccttttaatctccattttacacataagggcactgaggcttagggaggttcagtccttgtccaaagacacagagctgctaagaggcagcactgaacttaggacttgctgtagcttcagattactttgctccagtacagggcagagatggttgtacagctcagcctgtaggatgccacagtactgtcctgatactcatggcttgcttcttcctgttacaggccgaaagaatgagggtcgtgatcaactcagtatgccactggaggctatatgagtaaacagcaaactgtttctcatgaaagcaggatgttggcaaactgacaaactgcgtctgccacccagaaggaatgctgaaggcagtcacgacccaggcacaagtgtttcttgtgattaggcataattgaagcctgttaacaataatgtgaacttgtgatcaattaagcagctgaccagtcgttacctcctcctccctttcatcctacccaataaatgtggagggctgtggaagctcaggggctgcctttgctcactagaagcagggagctctcttcttccccagttcgccttctttaaaacagtttctttcgtcttaagttttcatttctacgttcgtcccccttcattcagtctcgtaatgatggtctcaagtagtaacagtaactgtcgtagtgatggtctcaagtagtaactgtacaagtctgccacatcttcccacagggtccattgcagtggcagcaatgcataaggaccctgcacaggtaagtcaaggatttctcaggctctctaccccaggcccccaccacttatctctccgttattttaggcatcctgatatagggaaaggtggtgtcctgaaacttcatgtttttcccttccttgggtctgaagactgtggttccacgacaaccaggagtcagaactcagcctctggttatagagtggtcctagttccgacaactgatgggataagatgtggcagggcgttcaggcacgggatatagaaagttcaaatgcttactggtgcgacttagctgggatgtttagtgaactgaaaatccatgttgtatctggtcgtgatagagtatggcagcagggtaggaggttggggcatacagggcatgcgggatcggcatggaatggcagtctaaggttctgggcctttcatctgagggcgatggtaactagggaaggtttgaggaggggggaaaaagaggtgacctgacccaggttttagtggctccctctgcctgcagaatggaagaccacgtgcaggtgagggtggagccaccgatacctgggtgatgggtccagcaacagcccaggtggaggttgttggtgactgaacgagagtggcggtggtggaagtgggaggagtggggggcttctgtatgtgtttgatctagagctgcctgtattttataacgtagagagcaaggaagcttgggagctgagatggaagagggggtcaggaatggccccacagttttggccttatttggaaggatggatgtcccagcaactaagatgtagtaagttctgtagtagggggagtgtttatatagtagagcatatgaggaaccaagttttggccaagtcaaaaatgttccagtggccaggcatggtggatcacacctgtaatcccagcactttgggaggcagaggtgggaagattgcttgaggccagcctgggcaacatagggagactctgtccctacaaataataataaatagctgggtgtggtggcgtctctctgtggtctcagctaatcggcgtgctgaggcaggagggtcacctgagcctgggaagtaaaggctgcagtgagccatgattgtgcccctgcactccagcctgggcaacagagtaagacaaacaaaaacaaaaatccaagccaaaacaaaaacaaaaatacacaaaaaatgtttcagagactttgagtggaggtgccaggctggcagttgtacacacaggaatggagttcattggaggtgttcaggaaggagacatccactacatgatagctgaactgttgtgaaactgggtcagatttaggaagcaatggtgttagtaggaaggaaggagaaggaacagactgaggactgggtgtctccactgggcacctggatggtgttggtgggtgtcacaaagacagatgagagagtggatcgactgagggtatgtgtgtgtatgtttgtgtgttatgttgggggcagcctgtggagtataaggaagggcttttgaggggagagtggccatgagatggatggtgaggcatctccacaaactcaccagggtttcatggtgagtcttgcttggacctgggtagtttcatgcaaactgtgagactactttaggggaagatgggatcagcaaggagcattgctaggcctggggtggggatagcattggggaggtcagtgtatctgggctttggattaggattagggggatagagaatgttgtgactgcttatgggaaaacatgtacattgcaaaagggggagacagccaagatctggaactcagaggaggtatgcaagaactgtgaggttgtcacttgggttttgggggggctgaggttaaaccagaaaacaggactgggaagggagaccttcagaacagggctcggtgctgccccaggcgctagggaacattatattctgggcagcccaggagcaaatagggttctggtgcactgcaggactccatgtacagagtggcatcttgggaggccatggaaatgctcctggttgggccagggctgctgttagtattgcaagagtggaggcattagatacatgagagaggtactgtccaaagcgagatgcgaaggtgaggaggagcatgaatgcgtggtcccagccctggcaatgggcacgtaagggagaagagtgagcctgagtttgggtgtctgggaggcaagatctggagaccccaaggaaatggggtgacaaaagaaggtagggccggccgggcgcagtggctcatgtctgtaatcccagcactttgggagaccaaggcaggtggatcacgaggtcaggagttcgagacccgcctgcccaacatggggaaaccccgtctctactaaaaatacaaaaattagccgggagtggtggcaggtgcctgtaatcccagctactcaggaggctgaggcaggagaattgcttgaacctgggaggcagaagttgcagtgagccactgcactccagcctgggtgacagagcaagactcttgtctcaaaaaaaaaaaaaaaaaaaaaaagagggtagggcgccctgggctaggcattgatgatgcttttgctttctccccacccatctttgtgctgtgctggactcagcaatcagtagcagtgggggcgagagaagtgcgaatgctaccaggatgtggagtctcttcctccttgggaagtgggtggaggctaagcaggggatggatgtgtgtgggtactggggaagcactgaagattctggagagggaagtgtatcagtgattgacccgctggattttcatttttggaaaagagtgagtgatgacagagaggctaatggcattgaaataattttaattactttcatttccttagtgcagggggaatgccgtgctgcaccaggccacgggaaatactagatttggttaggaggcagaggcatgactgaagggaaagcatatatcagagactgtattggggttttggcaggaaaggcatgcagggtgggatgaggagcttaaaactcagtggtttgcataagtctggcagccttagggctaagagattatcccttattgtgtggtgacagggcttgtgttgattaggacaggagaaataatcatgtatgagcattagatagtggttcagcatatgggatctggatcgcaagggaaatgtaaaaacattggctgttagtttggccctccaattcttagattttaagtagataaatacagatctaaggaaacacagaataagaagttgttcatagactgaagtgtcataattttggcaggattgtatggtctttgaggatgtggccatatatttctcccaagaggaatgggggatccttaatgatgctcagagacacctgcacagcaatgtgatgttggagaactttgcgcttttgtcatcagtaggtaaggccttcatacctactctggtgtcttgtgctgggtgctgtttttttgctcttttccatgacaactctgtctttcccacaccagattgtgagtgctacgtcctgtcctctcctggtttcctggcaaatgtgataaggcagccagagctgggctgtgtatactgtaccacctccccttaagcagccccagcttctgttgctctgaaactttacaagataaggctcggaagtcagaaatcttcaggtttctttaagatatcctaatggcggtgcctgtccctggtttgattactctgtccaaatgtgtgaaacctctgtccaagggtttccctgttccccttgctgacatacttggagacagtgtctgtgctaggaatttcaggcacctccctggtcaccacttgtgaggattgtgaagttatttctgcaggacgctctactgggtgttctggtagctttagaatgcagcatgtcctgggtttattgctctgtgtacatgctgtcccctccctttccctgcctttcccgtagctggacttatgccgcagctagatagttgctcaccttgagcaagggggaggtctctgggtgcctggcagagtggatagtcctctattaatggcaagagacactcagaaggacttggccctggtgggtgaaagctgggaaaggatgtgatatcaaggctgggttcaaatcacattgagaacttaccttgtgaccactattgtttgatgcagggccactggccactcgtcactcttcctttccttccctgttgttatttttactctgacttctgacccctggcttccacctctgacccctcctctccagccttcatctctccaccattctcttccacctctccctttgcagtgctgtctaatgtatgacctgtactttaggtgttatgaggtctgcgtgtatccttcagtagtccatgaatactcgctctcacacaatcagatctctctggatctggacacaaccgtcatggcctgttgaaagccatttatagaggagtgagttggagaccccacctgccctccctgcatggtacttctcccttgtgtccttaccaccaggattcccccactacacacacttcacaggcccacctctgaacactgggccttcctctcactggccttatttccttgcctgtgaccagtcctgtgccctcatttgtgggtgtgtctcacagacatttgtgatggggctgtctcctccctccggagttcacgtgcacttcaccagcatttctgttcttacaggttgttggcatggagccaaggatgaggaggtaccttccaagcagtgtgtttctgtaagagtgttacaggtcacaattccaaagccagctttgtccaccctgaaggcccagccctgcaagatgtgtagctcaattctgaaggacattctgcacctggctgagcacgatggaacacaccctgagcaagggctgtacacatgtgcagcagagcatgacctgcaccaaaaggagcagattagagagaagctcaccagaagtgatgagtggaggccttcatttgtgaaccacagtgctcacgtgggagagaggaacttcacatgcacgcagggtggcaaggattttactgccagctcagaccttctccagcaacaggtcttaaacagtgggtggaagctgtacagggatacccaggatggggaagcctttcaaggtgaacagaatgatttcaactccagccaaggtgggaaagacttttgccaccaacatgggctgtttgagcaccaaaaaacccataatggggagaggccttatgagttcagtgaatgtggggaattgtttaggtacaactccaaccttattaaatatcagcaaaatcatgctggagaaaggccttatgagggcactgaatatggaaagacctttattagaaagtccaacctagttcagcaccagaaaattcacagtgaaggctttctttcaaaaaggtctgaccccattgaacatcaggagattctcagtagaccaacaccttatgaatgcacccagtgtgggaaggcctttcttacacaggctcatctggttggtcaccagaaaacccatactggagaacagccctatgaatgcaacaagtgtgggaagttttttatgtataactccaaactcatcagacatcagaaagttcacactggggagaggcgttacgagtgcagtgaatgtgggaaattgtttatggacagcttcacactcggtagacatcagagagttcatactggagaaaggccttttgaatgcagcatatgtggaaaattctttagtcaccgctccacactcaatatgcaccagagagttcatgctggcaaaaggctttataagtgtagcgaatgtgggaaagcctttagcctcaaacataatgttgttcagcatctgaaaattcatactggagaacggccttatgagtgcactgaatgtgagaaggcctttgttagaaagtcccacctagttcagcaccagaaaatccacactgatgcattttcaaaaaggtctgacctcattcaacacaagaggattgacattaggccaaggccttatacatgcagtgaatgtgggaaggccttccttacacaggctcatctggttggtcaccagaaaatccatactggagaacggccttatgaatgcactcaatgtgcgaaggcctttgttagaaagtcccacctagttcagcatgagaaaatccacactgatgcattttcaaaaaggtctgacctcattcaacacaagaggattgacctcaggccaaggccttatgtgtgtagtgaatgtgggaaggccttccttacacaggctcatctagatggtcaccagaaaatccagactggagaacggcgttatgaatgcaatgaatgtgggaaattctttttggacagctacaaacttgttattcatcagagaattcacactggagaaaagccttataaatgcagcaaatgtgggaaattctttagatatcgctgtacactgagtagacatcagaaagttcacactggagaaagaccttatgagtgtagtgaatgtgggaaattttttagagatagctacaaactcattattcatcagagagttcatactggagaaaagccttatgaatgcagcaactgtgggaagtttcttagataccgctctacattcattaaacatcataaagtttgcactggggagaagcctcatgagtgcagtaaatgtagggaattgtttaggactaaatcgagccttattatacatcagcagtctcacactggagaaagtccttttaagttaagggaatgtgggaaagacttcaacaaatgtaatactggtcagcgccaaaaaactcacactggagaaaggtcttatgagtgtggtgaatccagcaaagtgtttaaatacaactccagcctcattaaacatcagataattcatactggaaaaaggccttagtggagtgaatgcaggaaagtcaccaaaactgtcacctcattcagcaccaaaaggttcacatcggaccaagaacctattaatatatgtaaatctaatgttgaaagagttcagatggaaatctgcgaggatttcctgctgggaactacattaaaaacatttatgtccaggcgtggtggctcacgcctgtaatcccagcactttgggaggcagaggtgggtggatcacctgaggtcaggagtttgagaccagccgggccaacatggtgaagccccatctctactaaaaatacaaaaattagctgggcatggtggcaggtgcctgtaatcccagctattcaggggactgaggcagggagcatcacttgaacctgggaggcggaggttgcagtgaactgagattgttccattgcactccagcctgggtgacagggcgagactctgtctcaaaaagaaaaaaattataattgtggcaaattacaggtaacttaaaatctaccatcttaacccatatttaactgtactgttcagtagtgttaagtcattcgcattgttgtcaattaatatccagaagttttttcaacttaatgaaactaaaacattataccctttaaaccaggggtccacaacccccaggctgcaaactggtaccagtctgtggcctgttaggaaccgggccagcatcactacctgagcttcacctcctgtcagatgagcagcattagattctcatagcagcctgagccctattgtgaactgtgcctgtgagggatctaggttgtgtgctccttatgagaatctaactaatacctgatgatctgaggtgggacagttttattctgaaactgtctgccccctcctctgtccctgatgcgtggaaaaattggcttccatgaaaccagtccctggtgccaaagaggttggggaccgctgctttaaactactcctcttcctcattccctacgccaaccagcccctgacaatactactgtatgaattttactataaatatctcatatgaggaaacttaagttttagtcttttgtgacttattttgaggcttatttccctaaatgtcttcaaggtttatccatgttgtagcatagcttatgattttcatcttttttaaaggccgaataaaatcccattgtagtcatgtgtcgcctaacaagaggactgtgttctgagtaatcatcttaaggtgattttgtcattgtgtgaacaaagagtgtacttacacaaacctgaagggcacagcctattacgcacctaggctatatgatatggtccattgcgcctcagatataaaccttaacagcatgttacagtattgaatattgtaggtaattgaaacacaatgataagtaaatgtgtatctaaacatatctaagtttccaaaaggtactgtaaaaatgtatgaaaaatggtaaaaactttatagggcactaacatgaacgaagcttgcgggacccctctggttgagtcagggagtgagttgtgagtgaatgtgaagctctaggacattactgtaccctattgtagatgttataaacattgtacacttaggctactctaaattaattttttctttagtaataaattaaccttagtctactgtaacgtttttacttcatgaacttttaaaattttaaaaagctttttgactcttttgtaataatagcttaaaacacaaacacattatacagcctgtatagaagtactcctttatattctataaactttttctatttaattttttaacttcgtaaaaaataagttaaaaatgaagacacagacacacacattagtcaaggcctacagagggtgaggatcattaatatcactgtcttttgcctccacatcttgtcccactagaaggttttcaggctcaataacagggagttgttatctcctatgataacaatattctggaatattttctgaagccttgcctcacactttttttttttttttttttttgagacagagtctcgcactgttgccaggctggagtgcagtggcacaatctcggctcactgcaacctctgcctcctgggttcaagtgattctcctgcttcagcctcccgagtagctaggattacaggtgcctgccaccacgctcagctaattttttgtatttttagtagagatggcgtttcactatgttggccaggctggtctcgaactcctgacctcatgattcgcccgcctcagcctcccagagtgctgggatgacaggcatgagccaccgcgcctggctttattttttttttgagacagagtcttgcactgttgcctgggctggtgtgtagtggtgtgatcttggctcactgcaacctccgcctcccgggtacaagcgattctcctgcctcagcctcccgagtagctaggattacaggtgcccaccagcatgcccggctaattttttgtatttttagtagagatggggtttcactatgttggccaggctggtctccaactcctgacctcatgatccgcccatctcggcctcccaaagtgctgggattacaggcatgagccacagcgcccggcctgtgctctttatatgactggcagaccagtaggtttgtttacaccagtgtcaccacacacacttgagtaatgggattgagttacagtggctgtggtggcactaggtgataggagttgtttagctctgttataatacgggattactgttatacatgtggtccatggtagacagaaatgtgtggcatatgactgtggtatatgtatatgccacttttcctgtattctttcttcagtgtacatttgggttgcttccactcttctgttcttgttaatgccactatgagcatgaatatacaaatacctcctgaggccctgctttaaattcttcttggacatatacccagaagtggaaatggtgcttcccgttaataataataattataataataataattattattattattttgagacggagtcttgctctgtcacccaggctggagttcagtggcacaatctcggctcactgcaagctccgcctcccgggttcacgccattctcctgcctcagcctcccaagtagctgggactacaggtgcccgccaccacgcccggctaattttttgtatttttagtagagacggggtttcaccgtgttagccaggatggtcttgatcttcctgactttgtgatccatccgcctcagcctcccaaagtgctgggattacaggcgtgagccaccacgcctggccacttcccgttaattctattttaaattgtggggggaattattttccatagcagctgcaccattttacattctcaccagtgcaggggttctagtttttcacattattgccaacactttgttttttaatcatgatgggtgtaagatgttattttattatggttttttaatttgcatttcagtattggtgttgagcatcttttcatttgcttgttgactaattgtataggttctttggagaaatatctgttaaatgtctttgcccattgaagaaagtttttgtaaattttcagataacattgtatgcttttgttgtgtacaacatgatgtgaagtatatatactttgttgagtggttaacatgtacgtattatatatgtacatattctgtatacgtattttaaatattaaccccttgcagatatgtgtttttcaaatactgtctaccattcagtctgcttccttttcattctgttcatgtcttttttttttttttttgcacaggagttttcaaatttcaatggagtccaatatatgttatgtttgtttcctatgcttttggtattatacccaagaaattattgctaaatccagtgtcatgaaccttttttcatgttattttctaggagttttatagttttaagttgtacttttatgtctgatttatttcagtttgttttagtaaatggaggaaggtaagagttcaacttcattcttttgcatatagatatccagctttttgaaagtcatttgttgaaaagactccttaataagtttttgcgctcttgtcaaaaatctgagcataagtatgaggacttccgtctggcctctttattccactatatgtatgcatttgtgctagtaccaaggtgttttgatacataattcttttaaaagaataatgtttctgtccactgttgaggcccttgctagaggcttgacagtgctacatttggaacagctgattaagtacacttccaaccactttccttaacaggctgtcaaactctgggtcaatatatatcagccccagtcaccccaggagcaggtatcagacatctggggacaactcctatgccctgaaatgtgtaaaattactcaaattggccaagtatagaaagcccagaaaatctagctaacccgaatccacttgccacacacaagctgcctcctacaactccagtttgctgtattactatctatattccttcacaactccggtgcagccctgaatcatgtcctctggttctgagttgtaagttacaacatgctccacctttcatctatctgtcatgtcatgtcctgacatcaagaaaacttctaaatcttaaaactacatacccagaagggtatcatgagtgcagcgaatgttggaaagtcttcagccattaacctcattcagcaccagtaaaccatcttggagaaagaccttaggaatgcaggcaggcaaagtgcttttgccagcagataaaatagtaaagctgtggatattagcttttgtgagggagacctcaaccagaaatggaatcttacatccaaacatccacacaagggaggtttgttgtaattgtctgctatatgagaagcttttgtgaattaccttgcactttctgacctgcctgggatccttgccagtgttaagtcactgaaagtgtgtactacaaaagacttccatccactattagctgatatcacagtgtgtatcaccttaaaatgcttagggagggcagatagctgtgctctctacctttatctggagttattgagtctgatcccttcgggcgaggcctcattcccacttccatggctggtttgggtgcagacatcatccaactttggacagaggatacaggctggcttgagctggcagcttgtaaagattttcctttcttcatgggtattattgcttgtcttataatgttggtgatagatttttcaccttccaagctgcccaaacccagtcaatttccacgtgactatactggttttagtgatgataaagtcattgtttaagctacatttactcattgcagttttattctctgtgtgctgtgggttgagagcaaaattggagtctgccaaaatgaaaaagtgagtggttttgtgaggttttcaattttatgtacttccaaggaaatagcaaaaacaaaaaaaccaaaaaaaaaaaaaaaaaaacaactcaatccacaaacgcctgatgtatattgcttcagaaggttcctgggaaaaagaaggatttctatccaaaatcctttaccctgaatttgaagattatttatggttgcacagtcagcttgcagccaggacaattggtttgacaactgtcaggatttatggcagctgtgagagctgggtatttgtacccatgcatgtcccatattctccagtattgtttagggatagcttgctcctgtgatgtgccttatgagctatgtgtcttgaacccaaaaatgatgtaggttatgttcctggatgtaaaatgtaagagtgcattagtttgttgtccattgcttataaaataatacctgaaactgggttatttataaagaaaaatctatttcttacagttatggaggttgaaaggtccaaggttgagtggccgcatttggtaagagccttcttgctggtagactgtgcaaaaagtcccaaggtggtacagggcatcacatggtgaggctgctgagtgtgctcacatgttaacgtgctagcgcaaatcattctctctcttttttttttttttttttgagacggagtttcgctcttatcgcccaggctggagtgcaatggcgcgatcttggctcactgcacctccgcttcctgggttggctcaccgcaacctctgcctcccgggttcaagcaattcttctgtctcagcctcttgagtagctgggattacaggcatgtgccaccacaccccgctaagtttttatttttagtagagcagggtttctcccatgttgatcaggctggtctcgaactcctgacctcaggtgatctgcccgccttggccccccaaagtgctgggattacaggcaagagccacggcccctggccctttctcttcttataaaaccaccagttctcccaggataacccattagtctatcaacccataaattgattaattcattcctgaggatagagccctcatgattcaatcacctcttaaaggtcgcacctctcagtactaccacactgtagattaagcttcaatgtgacttttggaggagatggtcaaaccatagcaagcagtttgggaaccatagtctgtacagaaacagtgattgtattaatatgaagtatgagacaccagcaaactagagtggaatggatgagcgccttgtaaagagacatccatgaatgtttcagtaactatggctatgtgagatgagggtatacagaaactctgaggacctacagacgtgtgtatctcctgtaggcaaagtcattgtcagagcaagtaatccaaaggtgttatggattcttgtgtctctggcgttataaaacgtatgttgaattttaattgccattttaacagtgtggagaaatgggacctttaagaggtgattaggtcatgatggctctgcccttataaaggaatcaatgcctttatcataagagtgggtttgttaacccgagagtgacgtttttataaaatcagctgtctctgtctttcatgctcacttgcccttctgtcatattatgacagagtaacaaggccctcaccagatgccaagcagataccagtgccatacccttggacttcccagcctccagaactgtatgaaacaaactactttataaattacgcaatctgtggtgttttgctatagtagtggaagacagacacagacataaagcctgttaattcaaaccactactgcacaggtaggagcctcatgactgaatgaagggagattctatacttctgagataagtcttttttttttttaaacctaaacataattcctggtgactcaggtggacataaccttccttgtctccagttcttcttccccgagattctgaatttccaacaacattgcttccagtttttgatactataaaatcagagttgacccacgtaagacatgaggagaggctaatgatggaatcaacacagctttgccagaggttataaaagaggattgagaaatccagattttatttggaatttttcttttctaacagctttattgaggtattagtgacattcagttgcacattgttaaagtgtaaaatatataaaaacaatcaccaaagtcatgataataaacatatccattgcctcaatagtttgtttgtacccttttctattctctctcgctcacagtcctacccaaatttttatgctcaggtagccactggtttactttatgtcactatatacatctttccttccttccttcctccctccctcctgctcttttctttttccttttttcttttcttttttctttgtttctttccctccctccttctcttctcctctcctctcctcctctcctcctcctctcctctcctctcttctcttctttctctttctcagaatttcactcttgttgcccaggctggagtgcaatggcacgatctcagctcaccgcaacctccaccttctgggttcaagcgattctcctgcctcagcctcctgagtagctaggattacaggcatgcgccaccacgcctggctaattttgtatttttagtagagacgggggtttctccatgttggccaggctggtctcgaacgcctgacctcaagtgatccacctgccttggcctcccaaagtgttgggattacaggcgtgagccaccatgcccggcctataaattttctagtatcttatacaaatgaaatcctacattacattcatatggagcattttttgatatttatacatgttaagcgtattcattttttgttgatgaagagtattgcattgaatataccacaatttattaatctattaataaatattttgattgtttctagtgttggactaaaaaactaacaaagacccatgaacattcatatacaagtgtttatatgaatatatttagcagaattgcatttgttatacctccttgtccatgatggttatggtgtattttaaagattaaccattttcatagatgtgttgtggtcagtgtggtttttaaatttgcatttctctaataattaatgatgctgaataagtttttatatgcttatttgttatctgtatatttggccaaatttctaaatcttttccctttttttaaaaaaaaatcttatttttctattttaatagagttttaattttagaacattttaagatgtacagagaaattgcaaatatagtacagagatatctcatttacaagcacacctagttgttactaatatatagtcatatattagtatacagcattatttacaattagtgaaacagttttgatacattattaaactaaagtacatctttgattgagatttcctcagtttttaccaaaatacatgttctgttccagaattccacctaggataccacattgcatttattttattattttttattcttttatttattttttttcatgtgtctctaaatgtaaccacattacagttagtactcacatttctttaggcttgtcttgcttatgagaatactcatttattttgatattgatttttaatttttttttttttagatagtcttgctctattgtccaggctggagtgcagaagcactttctttctttcttttttttttttttttttgagacggcgtcttgccctgtctcccaggctggagtgcagtggtgggatctcgactcactgcaacctctgcctactgggttcaaggattctcctgcctcagtctcctgagtagctgggattacaggcacctgccaccatgtctggctaatttttgtatttttaatagagatggggtttcaccatgttggccaggctggtcttgaactcctgacttcaagtgatctgcccacctcagcctctcaaagtgctggggttaccggcgtgacccacggtgcccagccacttttagttatttttatttttattttgagtctccctccgtcacccaagctggtaagtaattctcgtgcttcaccctctggagtagctgggactacaggtgtgtgccacatggttggctaatttttgtatttgagacagggtttttgccatgttggccaggctggtctcgaactcctggcctcaagtcatcttgagtggatcacttgaggcatttgggagtgcctcagcctcccaaaacggtgggattacaggcgtgagccactgtgcccggcctgcacatgtctttcttacatgtggactctccaggggatttatgctgttcaagaagcacctgaatcaaactgtgctttaaaaatatttttaaaacattccatgattcttcatagtacaaaaatgagaaatctcccctaaatctctaaagaattccctttttaaactttttgatttcctgaacttgtctgaaggacttaacacagttatatagagtgttctttgtgtaacagtatccatgactttcatttttagctctggtattagatcttcctggacaagagcattactggccatgtgtatgttgctatcacaaataactagtagttaatatttcctaaatcttagcaagagttatgataaatagctgaattccatgaagagaaaagactcatggcatgacaaccagattaggaaagagtgttttccttgtcctgcaggcaaaacagaactgagagatatgagtatcactcatgatgaggacaaaagggctgcgtgctgggaaacatgaggcgaccaacacagagttggtcactatccactggcctgggtttgcaactacagttgtccaaattgtcagaaaactatggactgaatagaaaacaaaaaaggagctcaccaggaccatgatggtgtgtgtggctctggcttcctgggaaggtctgcaggagagtctgttgctgtgattgtgttggacttgctgcttgtgtctgtagaggaagaagaccatggagccactggcccagaccatgaagcccaaactcataaaatcaggggaaaaatataagactgcatgtaatgagctaaatctctttgatgctttgtaagaacagtatccataattgttttttgcactactgtttttgctattcagtgggccattcactaatagaagaacagatgcattcatcaagacatggggggcccagcagaggagacaacagaagtcaataaaccttggggatctaatcttgatctccatccacctgcatatactggggttgagcttaatggcttggaatccattgagaaggcagatggtgctgagggaaactcttgtgcccaccctgtgataataaaagacaaacttacatccagtgtcattcagcaaatatttcaatccaaaagctgccattgtctgaggtatccctttaaagaaaaggaccatggagttagccaaggccagttggctgagaatcaagtccgtgggtctcagcttgtgtccagtgaacaaaattaagttataaaaacaaaggagaaaggaatttcccaggatcccaactccagtctgaatgaggaagctaatccctgattttacttttccaaaagccatttcatcaaaatctaggggatgttgattttcattgaggtctgaagaatcagtagaataaaaaagcagaaagaagtatcttgtcatcagtggagacagaagttttaatgtgtctccaaccatattttctcatcttaaacagaaattaagattgtccctgttcgtgcaaaggcaattgcttgtgtgtccaactgcagagaagcaggtgaatgaatgagggctcaaccgcacaacagatccacaaatcaaacctataaaactcagggcttacacacatgcaacaagtaaatacaagcaaaactagggaaatatataaaaacagaacacagaagagtcaatatcattagagtgatattatactatagtttgcaaaatgtaatcatgacggaaccctgggtaatatggacagggctttttctgtattatttcttatgactgcttgtgagtctacacttatttcaataaaaccttcaattaagtagcctggagatatgaaaagcaaaaataatacaccataaaaccttttccacactaatattttagtaaacaccattgttattgatgcattgaaacaaattttaggccgggtgcagtggctcacacctgtaattccagcacttcgggaggccaagatggagaccatcctggccaacatggtgaaaccctgtctctactaataatacaaaatactaataatacaaaaattagccgggcatggcggcgcgtgctagtcccagctactcgggaggctgaggcaggagaatcgcttgaacctgggaggcagaggttgcagtgagctgaaatcaaaccattgccctccagcctgggcgacagagcgagactctgtctcaaaaaaaaaaaaaaaagaaattaaaaaaacgctacaatacaattggtaacaaggccttcagcacagtacaaatgctaacttgaagaatttttaaaaactataatttttggaacaatcaacattgcatcatggtatattttattttaagcacatatatttctgttattttccaccggacaggtctagagattgtgaattgactccgtagaaataaccatgaccaccttgagcccacacatttttatctcaatgccatttctcacaagtaaatgcaaaagatcctgaaaataaatactaatcccagaaacacctaagatatccttaaaacttgttaaataggaaattcaatatgttccagaaagcttgggtttatttttagggaaagataattcaattgggagggaatttcattgcacaatattcatatatatcaatcacaaaagaaatagtaactgcggccaggcacggtggctcacgcttgtaatctcagcactttgggaggctgaggcgggtggattacaaggtcaggagatggagaccatcctggccaacatggtgaaaccccgtctctactaaaaatacaaaaattagctgggtgttgtggtgcgtgcctgtagtcccagctactcgggaggctgaagcctcctgggttcacgccattctcctgcctcagcctcctgagtagctgggactacaggcgcccaccaccacgcccggctagtgtgtgtgtgtgtgtgtgtgtgtgtgtgtgtgtgtttagtagagacggggttgcaccgtgttagccaggatggtctcgatctcctgacctcgtgatccgcccgcctcggcctcccaaagtgctgggattacagggatgagccacctcgcccggccataatttagattcttttggtgtctctatggaattgctatcatcagggaaaattatgaggtattttctcccatgaataactacatctctttaggggtggagcaatcaataacacagcagtatcaagattctcaggcgagaggtggctcacgcctgtaatcccagcagtttgggaggccgaggctggtggatcagctgaggtcgggagttcgagaccagcctgaccaacagggagaaaccccgtctctactaaaaatacaaaaattagtcagaggtggtggcgcatgcctgtaatcccagctactcgggaggctgaggcaggagaatcgtttgaaccccagaggcggaggttgcagtgagccgagatcatgccattgcactccagcctgagcaacaagagtgaaactcggtctcaaaaaaaaaaaaaaaaaactcaggctctgaggtatgaaaaccttttagattcccacaaaccacttgttgacaaatgtttttcctatttatatgaactcatcatttattttcaagatagttcctgattctttgctttaatctcttattttgctccattgtcctagttgtataatttatttccaatatgcatttggtttcctattttttcagcttctccttataaagtaccatttttactatgactattttgaaagcttcttgtatgtataaagttagtgtgattattgactttaacataccacctccttctcctcctagcctcagaaagaagtgttggtaactggtgagaattttcagacagattttcctttttttttttaatttaatttaatttttttttctttctttgctttcttttttttttttttttgagacagagtctcactctgttgcccaggctagagtgcagtggcgctatctcggctcactgcaaactccacctcccacgttcaagcgattcacctgcctcagcctcctgagtatctgggattacaggcgcctgccactgcgcctggctaaattttttttgtatttttagtagagatggggtttcaccatgttggcccggctggtctcgaattcctgacctcgtgatccacccaccttggcctcccaaagtgctgggattacaggcgtgagccaccgcgccaatttaatttaattttttaaagttccaggatacaggtgccggatgtgtaggtttgttacataggtaaacgtgtgccatggtggtttgctgcacctatcaacccgtcacctaggtattaagctcagcatgcgttagctatttatcctgatgtgctccatcccccgacccctttgacatattccagtgtgtgttgttcccctccctgtctccatgtgttctcatcgctcaactctcacttataagtgagaacatttggtgtttggttttctgtttctgtgttagttttctgaggataatggcttccagctccatccatatccctgcaaaggacgtgatctcattctttttatggctgcatagtattccatggtgtatatgtaccacattttctttatcactgatgggcatttgggttgattccatttctttgctattgtgaatagtgctgcaatgaacatatacatgcatgtatccttataacagaatgataataatagaatgatttatattcctttggatatatacacagtaatgggattgctgggtcaaatggtatttctggttttaggtctttgaggaattgctacactgtcttccacaatggttgaactaatttaccttcccaccaacagtggaaaagcattcctatttctccaccaccttgccagcatctgttgtttcttgacgttttaataacagcccactgaacagcaaaaaccttagtgtgaaaaacaattatggagtctgctcctgggcaatgcaagaaatatttggcaccttatatacaattatatacttttctcctgactttttgagttttggcttcttggtgtgggtcagtggctccatagtctttgtcctatacagacacaagcagcaagtccaacacatttgtagcaagagactctcctcaaatcagtataagtaaaattaggaaaatattaagatgatagtgagggccgggtgtggtggctcatgcctgtaatctcagcactttgggaggccgatgcaggcggatcacgaggtcaggagatagagaccatcctggctaacacggtgaaaccccgtctctactaaaaatacaaaaaattagccggacattgtggcgggcacctgtagtcccagctactcgggaggctgaggcaggagaatggcatgaacccaggaggtggagcttgcagtgagccgagatcgcgccactgcactccagcctgggcgacagagtgagactccatctcaaaaaaaaaaaaaaaagatgatagtgaatatatcaaaatcaatatcatcattgtgatattatactgtaattgccaaatgtaaccatgggtggaaactgggccatgtgtagaggctctctgagttattttttaaactgcttgtgagtctaaaattaaattaaaattattgttaataaaatggtcagtaaaaatgctcaggaatatgtaaggcaaaaataaggcattataaaaccttgtccgtcattatgttttaatacacatctcctcacatacttatcatttctttctgatgagaacatttaaaatctactcttttggcaattttggaatagacattaacaatagtcaccacgccgtgcaacagatcactagaacacattccttgtgtctaactgaaacttcgtatgctttcacaaaaacctcccgtttttcagtttgccctctatctctttagcctctggtaaccaccattctactctctacttttataaactcaacttgcctaaattctgcatacaagtgagaccatgaccatgtggtgttggtctttttggactttctttgaatgtgtcctgccttcagagatgtgttgacctacaagaaaaatgtattgaagcataccactataatgtgtgcacatttctgaatgtcatgtataagatacctatttttgccactcctattcagtatagtactagaggtcctagccagagaaatcaggcaagaaaaatacctagctaactaaataaaagatattcgggtgagaaaatataaagtaaaattgtttttctttgttgtaatatgatcttataaactcttagaactggggaacaaatttaatatagttgtaagacacaaaatcaatatacaaaaatcagtagcattgcggtacaccaataatgaaatagccaaaacagaaatcaagaaggcaattccatttgcaatagctataaaaagcaaaataaaataaaatagaacactgagaaatatttaatcaagaggggaaagacatcaaggaaaactacaaagcattgataaaataaactgaagaggacacaaacaaatggaaagacatcccatgctcatgtattcaaagaatacatattgttaaaataacagacagtactacccaaaacaatctaaagatttaatgcaagcccaatcaacatacaaatgccattttttcacagatatagaaaaaaattctaaaatttgtatggatcttcaaaagagcccaaatagccaaagcaatcctgagccaaaagaacaaacctggagcatcacactacctgacttcaacaccttacacagccatagtatccaaaacagcatagtattggtattttgtttttgttttttgagacggagactcgctgtgtcgcccaggctggagtgcagtggcgccacctcggctcactgcaagctccgcctcccgggttcacgccattctcctgcctcagcctccccagtagctgggactacaggcgcccgccaccacgcctggctaattttttgtatttttagtagagacggggtttcaccatattagccaggttggtcttgatctcctgacctcgtgatctgcccgtctcggcctcccaaagtgctgggattacaggcgtgagccaccgcgcccggcctaggacttctttttaacatatgtgttgagattccaatctttgtggttgctatttctttgatgattaatttatagattacaatgattattactatgcagtcaaatcacaatgtattttctatagaaattaatacaaaatatatatttaaaataaaatgagttagtttagtcttccaaaaatttttgtagtttagagattatttaaattatttgagttagcatttgtacttgctttgttctatggtgaaagctttgctaccaattacattgtaggtttatttgtttcaattcatcaatacccaatggtgtttaccaagatatgattaagacaaggttttacaatatcttattttcatcttacatatcactgggctatttaattgaaaattttattgaaataattatagattcacaagcagttgtaggaaataaaacagaaagagcctggcccatatcgcccagtttttcctcatggttacatttgcaaattatagtataatatcacaataatgttattaactttgatagatcttatatcttttaaatatttcccttgttttatttctattcctttgtgagtgtagaacccctgagttttatggattttataatttcattttaattgaacattatttaggaattatataaagtatttatgtttgtaaaaacccaaagatatatcacagaataattccatagaatcctaactttcatttctgtttccccacctgtctgtccctatatacatatgcctctgctggcttcaaataattcagcatcctttgtacactcttctgacccatgcctttttcacttaagcatatacccttaagtaaaaccatatatgcagttcaaccttaatgcaaactatgtgttcatacaaagtactgagctagactgggcgcagtggcacacgcctgtaatcccagcactttgggaggccgaggtgggcaggtcacctgtggccaggagttcgagatcagcttgaccaacacggagaaactccgtctctactaaaaatacaaaaaattatccgggcgtggtggcgcatgcctgtaatcccagctactcaggaggctgaggcaggagaatcacttgaacccgggaggcagaggttgtggtgagccgagattacaccattgcactccagcctgggcaacaagagtgcaactccacctcaaaaaaaaaaaaaaaaaaaagaatgagatcatgtcctttgcagggacatggatgaagctagaagccattatccttagcaaactaatgcaggaacagaaaaccaaacaccacatgttctcacttataagtgggagctgaacaatgagaacacatggacacagggaggggaacaatacacactggggcctgtcgagggatggggctgggggagggagagcattaggaaaaatggctaatatatgctgggcttaatacctaggtgatgggttgataggtgcagcaaatcaccatggcacatgtttacctatttaacaaacctccacattctgcacatgtaccccagaactaaaaattaaaataaaaaaaactcgttttgttgatcttttgtactttaaaatctctatttcatttatttctgctctgatctttatttccttctaccaattttgagtttaatttctttgttttagttttcttctttgttttagttttaggttttttgctttagtttcttttgggtttttttctttgttaatgtattctctgaatgatctgcccattgctgaagatgaggtgttgaagttctctggtattactgtattgaagtctatccttttgatctactaatatttgctttatgtgtttgtgcgtgccctaatgttggggtcatatatatttacaattgttacatctttctaaattgacttttttcattatataattactttctcttttttagtttttaacttgaaaaactgcattatttaaaaataattattttacctgatataaatatagctagacctgttccattttggttttcatttgcatggcatatctttttctatcccttcactctcagtctgtacatctttataggtgtagtgagttttcttgtaggcagcatatagttgggtctttttttttttcaatccattcaactactctatgtcttttagttgaagaatttcatccatttacattaaatcttatatttatagttagggacttactacttccattttgttatttgttttctaagtcttctctaattttcttactcccttttttgtggataagtgattttctctggtagtatgatttaatcctttgctttttgtttttagtatctctactataaatttttgcattatggttgccatgagacataaaaagtatcttacagttacagcaagttattttaaactgatgacaacttgactttgatcacaatgaaaagaaataagcaaagaataaactaaaaatctctacactataactcatcactccttttcttttcgttgtctcactttatatctttttatatatctcctaaaaagctattcagtcatcattcttgacagatttgtattttagtgctcacactaaagatatgaggggttcacacaccagaactacagtgttaaaatattctcaatttgtctgtgtatttacttttgccagtaagttttactccttcagatgatttcttgttgcacattagcattcttttctttcagactgatgaactctctttactatttcttgtaagacaggcctggtattgatgaattccctcagcttttgtttgctgggaaagcctttatttcgccttcatggttgaagaatatatttgatgactagaatattcttggttgaagatggttcccttcagcactttaaatacgtcttttcactttcttctggcctatgagatttctgctgagaagactgctgccaatctactggagttcctttatatgttatttgtttcttttctcttgctacctttcctctttttcatctttgacctttgagagtttgattgttatatgtcttgtgttgaatctggttggcattctttgactttcttatacctggatattcatatatatatgaatatgaatcatatatctatatgaatatatatatgaatatgaatcatatatatgaatatatatatatttggaaagtactctataattatttctttgaattaactgtctatccctacatctttctctactccctttttaaaggtaatcactcttagacttgcccttttgtggctattttctatatcttttaagcacagttcattctttttcttttttctcctctgtattttcaatagcctgtatttaagctaacaaattcttctgcttaatcaattatgctgttgttatattctgatgtatttttcagttcatccattgtctttttcagcactaggatttctgtttgatttttttttttttttttggtaattatttcaatctctttgttaaatttctctgctaaaattctgaattctttcttcatgttttcttgacattctttgagcttcttcaagacagatattttgaattccctgtctgaaaggtattccctatctgatagatctctatcactccagggctggtcactgggcagcttatttagtccatttgatgagatcatattttcttgaatgttctcaatacttgtggatatttgtacatgtctgaacactgaagagtttcttatttattccagtcttcacagtctggccttgcttgtactcattcttcttcagagggccttcaaagaattcaaaggggactgagtgctgagttccctaagctgtggtcactgcagccatttcagcactagagggtgccataatcccaagtatgcaataaatcttgcagactcctagatacccagcctagatagatgtgggaaagagaagacaatgttctgggttcccaggcaaagtcccttactctcttctctctcattccccgaagtataagaagtccctctatatataccaggctgcctgtaattgggggagacgtgacacagggactcctgtgtccatcacagctggcatcacagtaatgctagtctaaacccatggactctatgaccagcacagtactggggattgcccaaggtccacagtcagtactacctgactgccactgacgtttattcaaggcttgaggccactttagtcagcaggtggtaaaaccagccagaacttgtgtccaaccaaccaggacagcagattcccttctggcctgggttgggtctagccgcactgtccaggaagaaaggcctgggatcggtggcttcaggattctacttggcgctttattttcctatgactgagctggtactcaagttgaaaaacaaagtcatctgtactcttccctctcctttcctcaagcagaaggagtctctttctgagccacactgcctggagttgggggaggggtgtggcacactcccttggctgctacggctggtgtcatgctgggtcacatgcacccaaagtccacagccttagagaccactgcagcaccagggcttgcccaaggactgcagtccttgtgacctaactgccactcaaacttattctgggccccaggccacttcggtcagctgttggtggtgccagctgagactcaggttcctttcacgggggttgaaaggaatttgcttctggccccaggctggtgtaaatgctgtctccatgggcacaagtagaattgtgccgtgttgtgttcttctgtgcctgggcagcaccaggttccaatgcagtcccacactcacttcgtgctctcttctacaagcacacagatttttctctgcatgttggtctgccaagggatgggaaaggggtggtttaagcaatgcaagactacctttcctacccacttcaatgcctttcttcttgatattatgttaaaatcaggtactccgatcactcatctagttttctggttcttatgaatgtgctttcttgcatgagtagttgttcagctcgtgttcctgtggggagaaaattgatgaatgtttctctttggccttcttgctccactgatttttctttttctagatttttacataaattgaatgatactacatgtaatcatctgcatctggcttctttcactgagcttaaggcttttgagatttgtccatattatgtataggcatccttttatattgctggatagtgttccatttcatagagatgctacaatcgattgctgccatggacattattgtgcatacccaaaatttatatgttgaaatcctaaccccctagtacctcaaaatgtgatgtatttggaggtaggactttaaagaattaagttgaaatcagcccattaggttggaccctaatcttaccagtgtccttataagaaattaagacacacagagacaccaggggtacacatgcgtacagtgatggccttgtgaagagacagaaagagggcagccatgtgcaagccaaggagagtggcctcagagaaatccaacactgccagcatcttaatcttggactttagaattgttagaaaattaatttctgttgtttgagccacccagtctttggtattgtgttatggcagccctagaaaattaatacaattactcattcacctatggatggtcatttgagaattttttttaagtgttctagttattggttagatgtgaagtttccataccttctccccacaaagtcaaggcacatcaccctcctggtacatcaacatgttcaccaaccaggaaactccaccaagcctctgcgtcaagagttctaagttggtagggaggaacgaggagggggtatctcattttgtagctgtgattaaatcacaaccacatggctgacttcaatctctagttcctttcctctccccaaaggtcaatctggctcaaagtttcaaccctcttattacatggttggtctttctgatgaagagcccccattctgaacctttctaggagcctataatgaatcacttcgttagtataaaaaatacacttctctcactcaaagaattacaagatttttgtagtactaagcctgggacaaagatccagatatattttttattacaccacagactgtatttaatataataattaatagattttctactgttaaaccaactttaagatcctaacaaatctcaaggctgggtgcggtggctcacgcctgtaatcccagcactttgggaggccgaggcaggcaaatcatgaggtcaagagattaaggccatcctggccaacatgatgaaaccctgtgtctacaaaaaatacaaaaattagctgggcatggtggcgtgcacctgtaatcccggctactcaggatgatgaggcaggagaattgcttgaacccaggaggcggacgttacagtgagctgagatcgcgccactgcactccagcctggcaatagagggagactccgtctcaaaaaaaaaaaaaatcctaacaaatctcactagaatatgacttattctttctctctaagagatatatagatatatgtattaaatatctttagtagaggatttttcagatctcgagtgagcctggtcagttggtatctttcaatggatttttgttttccaagtttcaacttactgagaaagggttgtttaaaacaatcacacattatccattatatgtttcaaagttatctagtactatactatgtttcattgctcctatctgtaatatgtgatttacgttctttctgattaaaaaaaggagacaccttgaataaattattaaaattgatagaccttccactatatcagaaagaaaaaacatgggttcatagattttctcaaaaaagaaaaaactaaataaggttactgtgaaaattaattctgaggccctagtacaaagatggagagctcagagcccaaaagtcatcctgtgttaaggagacatagctaagagtctcggtttgccaaggtagctggagtctacagagcagagtacaggagagaaaaaacttcagagatatagagggccatccccaagtattcagctgagtataatctgtgtttgcatatagaaaaagaccagaggatgggtaaagaaccacctgaaaggattatacgggaagcaattcccaaggcttatacagaaaacatgatagttctcatttcaaccagcttgagtaaaaaaaactcataactcatgaagcattaggtagagaatataggaaggttgtgtctcagtaatgggaggggaatttgtcttaaaatgtatgctgcaataatctcatcgagaaatgtttagaatcaagactccccaaaagatcatattgtttccaagtaacttaaccatgtaacagaaaaaagaaatcaagaatatctatagaaaattaaaaaaaaatcagtacctaaaattcagtgtccattcaaaattaaaccatgttaacagtatcagacaagggagattttagagaaagaatattaccagagattaacaggatcataatgataaagtggtcaacacatcaagtggacataaaataggaaatatttattattcacctaataaaaacatactaaaatatgtgaagcaaaatctgacagaactgcagagaagtaaatccaatttaatattcagagatgtcaacaatcctcttaaaataattgctggaaccaaaaccacagaatgtcaataaagatagaaaaaacttaaataacatcaaccatttttacctaatcaacacttgtagaaccccttcatcaaacgagagtacagtatacatttcaagtgaacatgtaactcataccaagatagcccatattctgggccacaaagcaaatctcaataaatgtaaataattcaagtcttaatgtactctgaccacaatggaattattgcagaaactaccagaaagataagcaaaatccccaaatatttaggaattaaataacatacatttaaaaagagccatgtgtcaagaagaatttttttaactggaaaacatcctaaactcaactaaaatgaaaccacatcggctgggctcacgcctgtaatcccagcactttgggaggctgaggcaggcggatcacaagatcaggagatcgagaccatcctggctaacacggtgaaacctcgtctctactaaaaatacaaaaaattagccaggcatggtggcaggcgcctgtagtccaagctactcgggaggctgaggcaggagaatggtgtgaacccaggaggcagagcttgcagtgagccgagatcgcgccactgcactccaacctggatgacagagcaagacactgtctcaaaaaaaaaaatgaaaccacatcaagcttgatgggaggtaattaaagcagttctcagatagatttttaacattaacatctcttccccatattaggggaaaaaaacccaaaggtttgaaatgaaggacctcagcttccatgttaaaaagtagcaaaagaaatgaaatccaataaaagcggaaggcattagtaaaactcaaaatggaaaagaaaaatcccaaaatatcagaaaacagaaaattcaataataccaagtactttaagatcaataaaattgtaaaattgataaatctctacccaaaccaatcaaggttaaaagaaaaatatagacattaccagtatcaggaatagaagaggttgcaccactacaaattctacaagtatgaaaataatattttgaaaaatttgagtacttaaataaaacagaaaaactccttgaaagacacaaaccatcaaagctcactctagagatagatggatggatggagtgacaaacagatggacggacagacagatgtatatataactagtatagccctccatctaccatggaaatcaaacttgtagttagatgctgtcctacaaaacacacttcagggccagagtgacagacagacaacacacacacagacagatgtacatataacttgtacagccctctatctaccacagaaatcaaacttatagttagaaactttcctacaaaacaaactccaggcccagacagcttccttggtgaattctaccaaacatttaaggaagaaataataccaattattcacaaactcttccagagagctgaagagcaggaatacttcccaacttactctataaagctggcattatgctgataccaaagccaaacctgggcaagatataaaattacaaagaaaaaaaagcaagcaagcaagaaagaaagttagggacaaatatcactcgtgaacattggtgcaaaacttgttacaaaaaaacaaaacaaaacaaaacaaaatagcaaatcaaattcaacaatatactaaatgactaatacatcatgaccaaatgggaattattacagaaatgcaaggttggcttaacatttaaaaaaatcagtcaatgtaattcatattaaacaactaaaacagaaaaagaaaaaaaccatataggattatggtcaccagagtccaagaaaacgccccacaaatccctattttcacctttgtgtagttctcttccacttttaaccaggattagctagggttacttatgaaatatagcagaaatgacggctcatcactttcagtttaaggtaatgacagatactgtggctttgttcttgtgtgagttctctcctggatcacttgctttgaaactatttctctacaatggaacactcttagcaaagtacaaatgaaaagaaatgaactatgaaacacagaacaccaccatgagccttaatttcagagtttaagaagccaaaaacattagaatacatattaaattactctatctctgtagaattctaggaaatacaaacaaatctacagtgacaacggatcaatagttgcctggggatgggtgaaggaaagggagaaaatataaaaggaatcaggaaacttttggtttgagaagtgccaacatgtatcaaaacttatcaaatggtacactataaatatgtgcagtttattgcaaaaatgtttagactgacttctggacagtaaccttagccataagagacacaggtatggaaatatttctgtaaaccctcataatggagccagagtaatggaaacacatgtggatgtacctttagaagggtcatattccctatagtttgctgcagttttctcattcctttattaatctgggtttctgcaccaactatgattcctacctgggccttctggaggacagccaatatcaactgcctactgaaaaatagacttcagagatcttgacatgtccactgagttcaaattctcctcaagaagccttgggaatatgaagtatcttctgggaacaagggacgtaattcatgttgctcccagacacattagagattatcacaacaaatgcccactgcttagggtgacctcaattacacaaaaaatcttaacatatagaccaaaagattaggcctacaaagactggcattctttcctaggagagctgaagcagtcaagtaagttagcttgacactagcataagagctagtctttgccatcctactatcacttcagagatacagatagttggagctctcacaaaagctgttcttcccttcatactggcttagctcaattctgttctcaacccaacccacaaagcgaacagaatcctcaagatttcagatagtctaaaaattaaggcatttgttgcaaaaccagaatatgaggcagccaatttcaggtcaggtgtcttgaaggctagaaaaattcgtcccaagtgccatgtgagatcaactatatccatgaagggaaacctctgccagtggtcagcagaacaaagctcccatttttctggctaaaactgggtcatgctcatgcttaaaccagtagtggggcagaaaaaaagtgagaatccttgatggcctcaggctactgatgattccctccagggaagggaatagtacagaggtctgtcttttgaaacacattggggttactttggcacaaggcaggactcttccagcacaaagacagatggcttctaacaggcactgccttgacgaaattccagcaagagtctagaaaattcagcatagctccagaaggcttcccatatagctggcactcggaagaacctccccagggtgagtgtttgagtgtataaagttctacttctggctgtcggctacacataaaggctatgcttggagcttctctctgatgtcagttattatgttgaacaaggaaacggaattatctcccatcctaaggcctttctccagtgtgaattttccagtggcggatgagggaagccctctgcctgaaggccttcccacattcactgcacttatatggcctttctccagtgtgaattctatgatgctgaacaagtacatgtttgtggctaaaggcttttccacattcactgcacacataaggcttttcaccattatgaactctttgatgtgcaataaggtcagagctttggctaaagaacttcccacatgcgatgcactcataaggccttgctccagtatgaacactccaatgtttaatgagtctgtatttgtgaccaaagtattttccacattcgctgcactcatatggcctttctccagtatggatactctcatgctgaacaagtgtagatttgtgactataggctttcccacattcactgcacttgtaaggccttgctccagtgtgtactctttgatgtacaataaggttagagctatgattaaaaactttcccacatatgccacactcataaggcatttctccagtgtggattctctggtgctgagcaagtatgggtttgcggctaaaggttttcccacattcaccgcactcataaggcctttctccagtgtggactctctggtgttgaacaagtgagtctttgcggctgaaggttttcccacattcactgcatttgtaatgcctttttccacagtgagaggcctcctcacacttggtgttgctgtgtggcttccactcattgtgaggggcatggtgctcgaaaatgcttgagctggctaggaagtccttacaagcctcccctgtcacaaaagacatctccattgattgcacagcacagttgttcagaagaaagggcctgctcttatcacttctaaagggtttctctccactgtgctgcttctggtgctggtgaaggtttgcactgaagcagaactgtttcccacacagcacacacatgtatggtttctgccctgggtgtgtttcctggtgctcagccaagtgcaaaatgtcttttaagaccaggccacatgtcccacaggggtaagccttctgagtagaaggacctcccttgggaatcctgatctgtgacattcctatagaaaagctctgctcaaaaggtatctcttcatcctccattccatgccaacaacctgaaagcagagaaatgctggtgaagtacaaattgacacaggtggaagaggggaagcctcactacaaatatgtgtctaacacaactaagaccaaggtcataggactgttgttaggacaagggtccaaactcaagttcagcaaatgtgtactatacggtagttggcatctaaatgtcatagaatggagaaggcctcaactgggagaggacaaagatgtggggtacagcacaaaaaagaggcaggtctcaaagtcattcacaatcagattttcttggctgctggggacaggtgagagttgtgcagaaggttatggtccataccaaagaaaatcaaattgctactcagtagttggtgtttaaggactatttgggctacacatctcatgaaacactaagtacaggccaatgctggaaggcactgtagaacaagccatggagaggaacaggtgagacatgaaggcagaggtatggaacatccagaggccaaaggccagagtatgaaaggccagtggccttagcactaatacaactgtaggcacaaagaggctatggaatgatatgaacccagccctgacatcacacctttccccagctcctactcaccagggtcactcccacctggagtctctgtggcaacagctagggtcatgtccacccagtcaggtacccagggctcactacccatcaccagtgaggcaactatgtgggacatgaaagatgtatgtcctaagggaaagatagaacagcactggtctgggtaacccatatagaaaactaaatattattaaaataatctcagagtaaggtcttgcaggaatagtgcagtggtcctagcaagtagcgaccataatggtccctacaattcctgacataggcaggccacaggaaatgtcagctaaaggaagagcgcagaatcccaggcacagaggtgtcatggatacagacagaggaattcagacagggaaaggacaagatggatatgacccactgggctgacaatacaatgcataactcctgaatccatgcctgcaaggctctgagacagcaagcgctgggaatgctcaaaaggagaaagtaggagtgcaaacagcccaagcccagcactcacagaacctactccaggcactaagaaatgagacagtgtccacggctctgatgtaggaaggacaaagatgccctgaaaaaaaggggaagggcaggacccagtccaagtcactggggtggatgtgacggccttacccagagaggccataagtgcaaagttctccagcatcacatcacggtacaggagcctctgagcctcatcaaggagcacccactcctcctgggagaagtacacgaacacgtcctcaaagttcacctgcccctgccacaatcaggagagccaagtccatgagcagcatctctcccaagaacccccatccgtgcccccacacatctccctcctgtacaccctcctacctaactcctcaactcaggaaatatcaggaccagatgtcattggtgtcttctctcgcctcatggtcccaatggatcactgtgtctacccatagcaaccacaggcaggtgaagaagttgtcaccctctaagctctgtgcttagcatacagggcctcacccttctgtaagcaaattcctctggggtcactaacatcatgcttaccagacaaccaaagatgggcttgcctttctcctttaagcccagacgtcatcagtctacacttctttccatatgtacatcactctttggatcacagttatctcacaactctggctctccaccatcactttcctggctcactaaatgcactaccactgtgaaatgaatattctcttttaactcccaatctacataatcatctttaagccatttcaggatgattcccgcccccttgctcttggttcccaccagacatgacagagacctgcaatttcttgaaaactcccttctcagtctcacctctaagtattttgcacaggctggttcctgtgcctggaacaaccttccaaccttattccaatggttggcagaaatggaaacccctccataaaacccctggcccggagtcaggaccctgggcttggggcttctccagagtcctcagacccaagagatcggagagtagcaggagagtgttctatataacaccacaatgctggagagcgtattgggtgggggtgggatcggtgagagcatggacattctcccctcacctgtatagggtccacaattacttctgagttcatgggaacctgtggggaagagggagactatgcgagtcaagcaatcttgaaggaaccccaaaggctcaaccccatcccatattcctacccagttacaatgtgcctgggagctgaatgtctaccctctgtgcttccatcttcaaggatacctcttaactgtgttagctcggaacagtgctcattatccgcccccatggccaacaagagtctgccctccatgagcagtctatggaatactttttaaaccctcggattctggctctcctctgttcagaaccttccatggctcccatcaccctcagaatagagacccagctgctcaggatgatattccaggtgcaatcacttataaagcgctctgatcctttcagacactaaaggcccagttttcccaaatgctccagctgtgaaccatctctgagcctttgcatacactggtctctctgcctggaacgtccttcaactcgtgctgtcaaaatgggtcccaaacacgagcgcccccactgttctagatacaggggcctgagctgcagtaacccgaggaatcgttcattcgaagctttgggattcagagatgggggtcagcgcgcagactcgcagacgcagcacccacctgtgccgggcccatcggctcagccgccgccatcaggcctgtggactacggaagggtggcgacaagtgcaggaacctgggatcagctgtccagggcccagcccagcggctaggtcactcaggcagcgccactgtcaagcctcaggcccacctctcttcagggaagaagacactctctcacgttttcccttttctgtcacctcaggtctgacattgcgttctggaaactaaaccagtggattaatggaaaagcaaacaaaatgtccacccgaggatggtagaggaagtcccgccctgacgttggtgaggaccaacggaaacgcctatttcctgggttttcattggcccagagccgccaagtttcctgggtaatgtagttcccacggcaccaacactagtaagcggcgtctcgcttcacctccaggttaaaagcccagagaagaccgccaggggcgcgtggaaatggtgtccctcgtctccaaggcccagacggagcttagcttcctcttgaaggagccatatctgtatttctggtgaacgtcgtgtttgacatcaaaggaatgtttagagacatgatttcagccttccttacgcagagaatgctcatcaaaaaataaaatggacacaccatacactgacgtcactcagatttctatggctggaagttaacaaatattgttttcaaatgcgtgtagcctgatgctccagagttagtttggcgagcctcagcattttctgtcaggcacaagaaagaaaagactccagacaccatgatgtggaacgtggagtggggatgtttggtggccttgaagtaagtgaataacccttctgtctgttacctcagaaaatatttatcctgcttatacagcagtgattgtgtcaaacccaacaagtaatactcttgttcaagatagtatttcatactccatatacagagatgtattcaatattttaagtgttttacaagtgtctgaaaagacagaattcatcaaatgtcatatggcaatgaaaagggcaacatgaacactttctgtaaagaagaaataaccaccaaactagatgtctatacacaacaaaatgtcttttatggaagtgtgatataaaactatttgaaaccaaaaatgataaatgtaatggaaatacatttacacaaaaaataatgtttaaaataatactcaaggccaaagaaagttgatctcaggtgaaaagtctgcaatgagagaagaaatgaagatgaaaagaagtgcatcttttgattaaaataacagcatattacagtgtaaaacataagtagatatacttattgagttagaatgatggaattcccgtgcgtaacctcaactacatataaattgaaaggaggctagttgctcaaagttttaaattttttatatttccaagtggaaagcaaatgtattacaatcctgtatggcacgctaatgtgttaaacgtttgtaatttttagcctaaatataataaatacagtcagcgtatatacttttcaaactagaagaggaaatgtttggaatataaataaataatcaatagaaaggtaaaataatagtaaaataagtggaagaagtgaggcaaagaaaagcacaatgtaggatatatttaaactgtcaacctaaataacagagattcttcaaagatgttgagttcattcaggaatgcacaggggatttgcaaatccaggacatgcaggctatagggactataggcatatccagagagcttgaaacaaggagaagctttcaaaggcaaaagggaaaagtatatataatttgttttgagataaaaagaacattggtcacagatgtttatggcagaggttaacaccagttcattagtggagacaatctgtcaggcaagtgttctactacatctagagctgtccttgtaactcctgtagcaagctgcggtttgagaagttcttgtcaaaacttcttttaacgggaatatgtgcattaagagccctcagagacagtaatagctcttatcttaagcatgtgtgtttgagtgccctcttttctcagcctcctggctttatttatttatttacttatttatttattttacacaagttactcattttggttttgacaacttttgcaaaacctaaatgactatgcaataaatactcaaataagcagttagtaatttttgatggaccaaaacacgcttcacgaggtattctcttttcttcagtgaatttccacagaatttgaattgtgattgaaagcacaactaacattcccagactccctactctgtcagtaagaaaagaatcatgttgtagttagaaacgtccaaaatctgctttagagaaaccaagacctacgcttgaaggttaccaggcccttgactcacccaactgggctgagatgtcatcagggaactgcatatcatcagcatcttctggttattcatacaggggtgggataaggatgacaataatttacatttaataatgtccatatcctagacattctatcagaccttttataaacactacgcacttttgccctgtaaagtggatttgtcacctaaattaatatgaggaaactgaggtttcttgggtctataatttattttcagctgtagctgttaagtggcatagttggcaatggagtccaaggagccatgactaactacttcccagcatggcctcctaccctaggtcatctatctgggtaggttcagagccctttctatgttagacaaacaaggctatgaaaaattcaatgtcccaggcagctgacatgaggacaagaatgtgtcttgccttttcttcaccacagaaacatgaaccttcagcttcatttattccctaaacgtgggttccttggatgccaatcaagaatcaaaacaggaaaagtcctgctggcccacaaatacagagggtttgataggtgaaatgttattgcctgagcctcaccgtatcatcccaaccacccacatatcctgttacctctgcctcctaatatgtctcaggtcatcttcttctcaacacctccaatttcatgcccttgggccaatctgccaacattcctgagctacacaatgccttctgccttgtatcctacatcagttttttctctactttagttcattctccacatatcatgcagaagatgacttcaacacaaatcaggttctatttgggagaatcagaagcatgttggtggctagagggggaagggcttccctccaaactttagtgttataacatggtttagggttataacctgtcctgcattttcagtggtcccaccagtaatttctatgttgtcttttttgtcaggctcattgctactgtccagcccctaggatttcttcctcagcagaggactcctgtaatgcccctgactcaatccacattctcttcctcctctctcctttacagcaagaactaaaatcatttccttgcagacctaggccagcgaacaggagattcacaaccatgttatcgatttggtgctgcccttcacacttcatggaacatgaaagctcagtgagggtctgagtccacttcccagcagagagagcatagccatgtgccatttatgtgagagtgcaatcttggtacatttagagtaactgtttaatccaatatgcagatggatggtgttcaattaggaattctcaaaatttttttaaaaagaattctcaaataaaaatctcatataattcctattccatttaaagccaatgattttgttttcctgtgctttgaaactagaacatccttgttgtctcaatcccaagacggaagccaagctaaaaaacaaaaggagcaggacttcacagaagccctaaggctcaatgaaggatgggccattgcacattgcacagtctttttaaaaaaacaataattgtactgctatccacacatccttgtgagtcatttctcatcagacatatattctaagccatatgcagtacatacagctctaaattctagtaatcatcctgacagaattctaatgaaggaggtggatgagcatttaccagattcaaatgaatgcaaactgaaaaataggcaaaactatgttagatgacaatgtaagaaatcagacatgccacaaattagacctccttgatgggtgaatgacttacagcgggggttacagaaatgctggtatggctgggcgcagtgactcacacctgtaatccagtactttgggaggcctaggtgggcagatcacgaggtcaggagatcgagaccatcctgggcaacatggtgaaaccccgtctctactaaaaatacaaaaaattagccgggcatagtggtgcgtgcctgtagtcccagctactcgggaggctgaggcaggggaatcgcttgaacctgggaggcggaggttgcggtgagctgagattgcaccactgcgctccagcctggtgacagagtgggactctgtctcaaaaaagaaaaaaaaaaagaaatgctggtatactaacactgttcttttttgattggcacactgcttttagagatgtgttgactttgggaatattcattgagctgtacaactacatgttaatttttgtgaatgtcatttgtaaattaaaatttaccaaaagttcatgctaacaaacccgaagtgcctattccatattgttatgcaggctggatgtgatggctcatgcctgtaatcccagaactttggaaggcctaggcaggtagatggcttgagctcaggagttcaagactagcctgggcaacatggcaaaactcgtctccgcaaaaaaaaaaaaaaactagccaggtatggtggcttgcacctgtggtcctagctacttaggaggctgaggtgggaggattccttgatcctgggaggtggaggttgtggtgagctaggatggcaccactgcactccagcttaggcaacagaaggagaccctgtctcaaatatatacgtgtgtgtttgtgtgtgtgtgtgtatataattctccaatgtagaataatatatatattattctccaatgtggaataataattaataataatactaataattcttgggcatttacccaattgaaataataattcttgggtatttgcctgattgaaatgaaaaactgtctttaagaaaaattcggctcttctccctttaagaccagctctgcctctgcctctgcctctgcctctgcctctgcctctccctctccctctcccctctcccctctcccctctcccctctcccctctcccctctcccctctcccctctcccctctcccctctcccctctcccctctcccctctcccctctcccctctcccctctcccttctcccctctccctctcggtctccctctccctctcttgccatggtctccctctgatgccgagccgaagctggactgtactgctgccatctcggctcactgcaacctccctgcctgattctcctgcctcagcctgccgagtgcctgcgattgcaggcgcgcgccaccgcgcctgactggttttcgtacttttttggtggagacggggtttcgctgtgttggccgggctggtctccagctcctaaccgcgagtgatctgccagcctcggcctcccgaggtgccgggattgcagacggagtctggttcactcagtgctcaatgttgcccaggctggagtgcagtggcatgatctcagctcgctacaacctccatctcccagccgcctgccttggcctcccaaagtgctgagattgcagcctctgcccggccgccaccccgtctgggaagtgaggagcgtctctgcctggccgcccatcgtctgggacgtgaggagcccctctgcctggctgcccagtctggaaagtgaggagcgtctctgcccggccgccatcccatctaggaagtgaggagcgcctcttcccggcagccatcccatctgggaagtgaggagcgtctctgcccggccgcccatcgtctgagatgtggggagcgcctctgccccgccgccccgtctgggatgtgaggagcgcctctgcccagccgccccgtctgagaagtgaggagcccctctgcccggcagccaccccgtctgggaagtgaggagcgtctccgcccggcagccgccccgtccgggagggaggtgggggggtcagcccccgccccggccagccgccccgtccgggaggtgaggggcacctctgcccagccacccctactgggaagtgaggagcccctctgccgggccagccgccccgtccgggagggaggtggtggggtcagccccccgcccggccagccgccccgtccgggagggaggtggggggatcagcaccccgcccggccagccgccctgtccgggagggaggttggggggtcagccccccgcccggccagccaccccatccgggaggtgaggggcgcctctgcccggccgcccctactgggaagtgaggagcccctctgcccggccaccaccccgtctgggaggtgtacccaacagctcattgagaacgggccgggatgacaatggcggttttgtggaatagaaaggggggaaaggtggggaaaagattgagaaatcggatggttgacgtgtctgtgtagaaagaagtagacatgggaaactttaaaaaaaaaaaaaaaattcttccagtgatctggtagaattgtaagaaaaaaaattctttaatcctaaggcaaatatacagtggttttattattaatgtacagtttctgacaaattattaacacatgaggtgtattaactatgatatatacagacaatgggatactactcagcagtataaataaagcattgctacacaaaacaagggtgaatcacaaatgcattacactaagtgaatgaggccagactgcaaaagctacgtgctgttggattccacgtatgtaaccctggaaatgtgtacgttcctaaaactccaagaagacagaaatcacatccatgatcctggggccaggagtaggggaacgaattaacctcaaagtggcatgagagaggaggagagagctgcaaactgaccactgagcacaatcatgtccagtttctcacatcactgctttccgcatgccctggtccagccactgtgtcttccttcctgttactgcagctcactaagttttctcccaccacatctctttggcacttgctctaccttttacctgaatatgttaaacttggttctttcatagctgcctccttctcatttttttttttttttttggtgtcaactcaattatcaccttcaagaaagccacccacatccaactcatctgaatgggcagtgtcctcagccttcagtttaaacatttccaactctgtcctcaatacaactgccattccctcacattctccccttcatatcccctattattttcatcactacttagaacaacttctggcatttgttatttatgtttgtctgtttttttaccattctaggttcagtttccaggtagaatgtggacttggcaaattctacaaaaccagaccaatattttcaaggcttgacctgggaggagagaatggtgtatttgggtggtatgagcagaggaaaaaactttttctcagtattttcagtcattttctggtgagtcagtgttcagcagagcaaggacatccaggtaagtctcaaagatgtggtatctatggaagagtagatgattgtagtggttaggaatagctgtactcttgagtagttggtgatcgtggttcctcagttccactggagcttccgaagagtttataatcaccaagccaacatctgctgggatggtgtctttgagcataagactatgtttgggcaataacaggacatagggctgcttacctgttgtagagcagaactgctcttctgaaatattagtctccttcctcgttgaggaaatggttatattttcccatcctgtggcctcatctccctgcctacttttccttataaggatagttcagatgggttagtcttggctctctagctgaggcgaccagacttcaagtgtctgaggaccaggtagccatctccatggaagtccagagtttccagagctgctgggtggtgacttcttccgttaagctctaaccttggggagggcaggagatgtcatcaaaatttgtttagttggttacagccctcagccttccctcattccctgcagctgctcatgtgttgagggttgacttgtgattagaccctgaggtgcatctgcttttcatgccatcttggatgggttagacttcccaaacacagaggaatgtgcttgctagccctgaaggagatatggccaaaggtagagtcttggactcaaactttgatgttcacactccttatagacatgtaaatattcctaaaggttggaaataaaaatagattccagaagttagagagaaaacatatagacccggcatatgttgcttttaaaaaataaaatagcttcatgggatttttttgtgaattcaatgagatataagtgaatttcttatgtagataatgattttacctaaaccaaataattagatagtctacttggtcctcaccagtcatgttatttgcaattctacatatgagcctgctttagtgggttgtctcttcctgtgataaaattaaaatgtctacatatactctttatttcaaaactatcacacaattcactacaactttcaaaagaggtatagtttgttttttaattaaaaccacatctgtgaaacaaccagtagtgataaaacatagtttctttctttttttttttaatttatttttttgagacagagtcttgctctgtcacccaggccggagtgcagtggcacagtctcagctcactgcaacctctccctcctaggttcaagtgatcttctgcctcagcctcctgagtagctgggatcacagtcacctgcccccacgcctggctaaaaaatatagttcctaggcatcctttcttttcacatcacctcacatgcctgatacaccccattaagctaacatttgcatgacatttttgttaatcattttgataatcattctataaatgtctttatagttttactacatacatatattttcctaaatgatatactgtttcttatttccagattctgaattttctatacattttacactgtatgggtgactagattctataatatgttttttaggtttgtccacaaaggttcctgtcatgatggtaagctaatttccataatctattagatgattaatccagaatctgctcttctaatagatgttctcaaggaagtgaaacatttattcctgtgcttggtttcagaaggaggatattatttacatattgtcccactcctgtcatggactcatctctcctcactctcctcctcccctcccttccatatgccacataatggtctaactgaaataactaatgccatagctgccatggaaggggtaaagagcttgtgtctctctctattctaccatgttctcaatcccaatattgactcccctcctccttttcagagtcaagtagtactgaacacccagttccagaaagctccaagaaggagggagggcttcattttctcttgtcctcataagtcactccaatgctgtgttgaaattgatcattattcagccaacagatggaaggggcaggaaaagaagtagggaaattagattgacacgaggggactagattcaatgggaatggatgtagtgggactacacataataaagggttgacatcttttttttatcaatagttgtgtgttgtaaacaacagtctagcattctacccacctgtgaggaactggctttatatttggaaatggaagagcagtgggaacatggagcataaagggatgaaggagagaaatggagggggagttgcctcatgggtttgccgcctattgttgtgcctgtacaccaatgttgggtctttgaggaaggaaggagcacaaatgagcatgggataaaggaggaaagtaaatccttgggctcccatactctctcatcacctacatccagaattcagagccttttcttattgtcatacatcaggcattgcttggccaccgttaattttaatattgggtgtccttttgtcaaaggaaatttggggatctatacgtggctcttcccagagaaacctctttactgtggccctgaagatcctcttcaattccttcaaaagaaggaaagattggggtatcagctgcaggaaactgaaatccaggcccatctccaaaaacagcagtttctggatgagtccgagagaagttctcaaccctaatttctcctccatctcctattccgttatctccatctccatcatcatctccatctccgtctccatctccatcatcatctatcatctccaatctccatctccgaagttatgcccacttcctggaagtttggaggcacgggaactacattgcccaaaaggcgcagcgccgcgaggcggcgatccctgaccaatgaaaagaggtctgcccgagcgtgcgacacgcaatgggcgggacttccggcgtctcgtttggtattcactttcgcgactcaggtgaactaacctgcgagaagctggttgtgcgctgaggcgaccagcgccggaaggcacggtggcgactcacgctgttctcgccgctcagaggcgggtctgaggctcggtggcggcgcccagggtggcccgggccctttcctcggtcattgtctcccctccagctctactcacaggctccgatggcggcggccgccctgagggaccccgctcaggtgagcgccgcgtcctcctggcctcccccgaatcctaaagccctgtgagggccgcctgctcaggtccccgggtgcagaactgtggggcgttcgtgcgcggcgtcccgtttctgacacgcagtgtgatggggtggcaatggagggcaaggggcccggctcgcaaagatgtgaggcgcattcagcgagtcccgaacctgaggcctcctggtgtctgtagtgggcagcttgggaagggacgaggcgcgtgtcgagcgacagcccgagcagctgcgctttcatcctgagggggccacagtggccgcggagggctggagacagaagagtgacaagatctgtttctcaaagtttgccaaaggcccttcaagtcaaaacagactggggtgggggtgaggcgggtgaagacagacctgtgagtaggtaaattcagtagactagtggagagtctactgggactgggccacagaggaggggaagtgatcagatcttggatggatatcaaaaactgaacagacaggaattcctgttgcatcagatgtgactgaaagaaagggaatgaagagccattctggatttttatttgtatttttgtttgtttgttcctgaatatcaggaaggatggagatgggtaaggctgtgcagggagtaggttttggacatggtaatcctgagatgacccagagtggaggtgtcgtgtccacatgggcagcttgcccactcacatctggaagtttggggagggatctgggctggagatatggtagatatgggctggttgggtagaggcctggactagggtaagtcctggggctcctatttaggagggagaatcttaaggttccctttcagatgggccctaaggtgagagaagggagagatggccctgtaggacggggctgcctctatagcatggagttttgtggtcagaagtggttctgtctggtgtctgccggaatggagggttatagagtatgaagacccaggactgcatggagactgcagtgttgagtagtatataggtttgccactccaggctcagcagttcctcatgtacagtccgtatggacaaaaggaaacgtcagccaggctgctggagcagcccctttggtgcctaagtttccctagccgtcagcacaggagggatgatcaactgctccagtagaagggctctcagcaggatggtcttcaggggagtatatagcaggcagccaggttgccaaaaggaatggtatgtgctcaggtttctcagacccaggtcccagtttattaacttgtgaatttatgaggtaagtatttaagcactaattgatcatagttcatatacacacaggggcaaataaaacaacacggatttattaagttaaactgatgtaagcacttcataattggttgtaaagttagtatactggaaagtatttgattaaaataaagcaccttaagtatcacattcttaatttaaaagtaagtttaagaaacccatattttctttttctttctttctttcttttttttttttttttttttttgagacagagtttcgcttttgttgcccaggctaaactgcaatggtgcaatctctgctcactgcaacctctgcctccctggttcaagcgattcccctgcctcagcctcctgagtagctgggattacaggcatgcaccaccacgctcagctaatttttatatttttagtagagacgaggtttcaccatgttagccaggctggtctcaaactcctgaccttagacgatctgcccacctcggcctcccaaagcattgggattacaggtgtgagccactgcgcctagccagaaacccacattttgaaaacctaccagtttatttgcgctgaaaatgttgacagaagcattaattatgtgtacagtaagagttgatacttagtcctagacacataagaatgagtttgatacaaacaatcgtcctattgagtaaataccattattattgccatgttgcagatggcaacaccaaggcacagggaagttgagcacttttccaagggcacacaacaggtaagaggcatcactaagaaccaaagcccagattgtagatagtcaggcacacctgactccaggctagacgagtgggcttggatgatcctttggcaacatcactgtctggttctcatagtcttgattttccataggttcctgtggctgcagacttgcttacagaccatgaggaggtaagtggaggatgtctcaggtcctcacactcctgcactcctacctacatggtcttcagaattatggtgtcttgaggctccttgctggctattctccctacccttccatttgagttccctggaagatggtcacacacagtcagggccctgagtccagactatatattatttttattattttcttttaagacagagttttgctcttgttgcccaggctggagtgcaaaggcgcgatctcggctcactgcaacttctggctcctgggttcaagcaattctcctgtctgagcctcccgagtagctgggattacaggcatgcgccaccacaccagctaattttggatttttggtagagaggtttctccacgttggttaggttggtctcaaactcctgacctcagatgatccgcccgccttggcctcctaaagtgctgggattacaggcgtgagccaccgtgcccaacccagactatgtattctatggagaggttctcatttctggcaaccaatgacaggaggtttagaaggcatagtgatcaacattagaaaatacatggaggtaaggttgagctgggaatgcttagacaacctcagatctccattatgtctgggggaagcatcagcgggtataaggccaacatgaagtgattggctgaggagctgagctgaggtgtcctgatatgtgtgcaattccaagtagctaaagatgaagcaagaaaaagagccaaggagggaggccttcaaagtggggctgaggattggccctggcagtcagtgccattgggggtctgggatggcacggagttctgattgcatttggtaagtgccctctggatgccatgtgtagactggcatgtggtgacactaggggaagcacatgaggtgatgtagagggtagtggttgtggtacaaagtatgtgcacattctaataagtgtaaacagatgtccccaggaccttgtactgggggcttcagggagaacactgacacaaatttgattgtatttgagaaacacagtctaggggatccaaggtaaattgtctggcaagagaagagtaggactctgcataccatgcccagagctgagatggactttatctgcctacctgcctattgttgctcagtgggagcatgaggagagagtgggcatcagtggctctggggcagggtctctcctctgagatggggattaaggaagagggtgagcaggggtggatgtttaggcagatgcctaaatttcccagtaaggaggctgcagataaactctactctgtccatcttagcagggctatgtgacctttgaggatgtggctgtctacttctcccaggaggaatggagattgcttgatgacgctcagaggctcctctaccgcaatgtgatgctggagaactttacacttctggcctctctgggtaaggttctcacaccccaccccagcatcctgagctgggctcggcttttcctccttttcctagggagaggtctgttcttcccaaagctgaactgtgggcactcattccttctccagtatcctgaagtagctattgtaataggcctgggctgtgtatactaccaccttctctccccaagctgccccacagctgtgcaggaaagggtttgggggtcaggagtcttgcagtcagcttgatggatcttatccctggtggcctctctgtggcctggtgacactgtgcagatctgtggtagttctattcccctacattctgcctgtctcctctagccaacatacctgggtgtcggtctgtgccagcaattgagtcaccaatgtgattgctgtttgactgtgttgttcctgcaagaccctcctccaaggttctttctgtactattttgttttctttcctgtggtccatgatgagataagtcattctggctcagtgctgccactcacctgtcgttttccttaggacttgcatcttccaagacccatgaaataacccagctggagtcatgggaggagcccttcatgcctgcttgggaagttgtgacttcagccataccgagaggtagttggtgggtggagctcagggaggtgtgaactcagggatggattcatatcataccagtaggcccagatattttgataccaaggcaaggggttgtcgctgatttctatcttttcttccttagtcacccatttatatctattctgatgtttgacctagggccattccccacctctctgtcctccatgtttcacccagtcatcagcagaacccttcagcagtggctttcactgaatgtgtggtgaggtggatgcttatccttgcatagtccttgagcatcagctatttggttgcagttggttttttctggacctggacataaccttctgtgccgtgttcctgtgtctccagcagccaaagtcctgtggaaagccatttgcagaggattgtgttggggacactgcctctcctccctgtgctataccccatccttgcatccttggtgctcatgaggcctccccaaatccttgagctggccagattcagcactgcacagcaggcccttccctgctgagagctagccctctttatttctgctagcagccccaggcactaattactgggtgtgttagacacatctgtgagagtgctgcctcctcacaccaaagtctacatttacttcttcaacatttatcttctgtcaggttgttggcatggagccgaggctgaggaggctcctgagcagattgcttctgtaggactgctcagttcaaacattcagcaacaccagaagcagcactgtggagagaaacccttaaaaagacaagagggcagggtcccagttttgaggagttgcaaagttcacctatcagagaagtccttgcaaagcagggaggttgggaaggccctcctgatcagctcaggtgttctcaagcaccaggtgactcacacaggagagaagtcacataggagctccaaaagtagggaggcctttcatgctggaaaaaggcattacaaatgcagtgaatgtgggaaagcctttggtcagaaatatttacttgttcagcaccagagactacatgctgggaaaaagacgtatgaatgcagtgaatgtgggaagttatttagagatatgtccaacctttttatacaccaaatagttcacactggagaaaggccttacgggtgtagtaactgtggaaaatcctttagccgtaatgctcacctcattgaacaccagagagttcacactggagaaaagccttttacatgcagtgaatgtggaaaagctttcaggcataattccacacttgttcagcatcacaaaatccacactggagtaaggccttatgagtgcagtgaatgtggaaaattgtttagtttcaactccagcctcatgaaacatcagagaattcacactggagaaagaccttataagtgcagtgaatgtggaaaattctatagccacaagtccaaccttatcaaacattggcgtgttcatactggagaaaggccttacaagtgcagcgactgtgggaaattttttacccaatgctcaagcctcatgcaacatcaaaaagttcacactggagaaaagccttttaagtgcaatgaatgtgggagattctttagagagaattccaccctagttagacatcagagggttcacactggagcaaagccttatgagtgcagggaatgtgggaaattttttagccaaagctcaaccctcatgcaacatcgaaaagttcacattggagaaaagccttttaagtgcaatgaatgtgggagattgtttagagagaattccagccttgttaaacatcagagggttcacactggagcaaagccttatgagtgcagggaatgtgggaagttttttcgccacaactccagtctttttaaacatcgaaggattcacactggagaaatgcagtgattgtgtgaaatcctttagccagcgtttcaacctcattcaacaccagaaagttcacagtggaaaaaatcttgaaggtaacagatggaaatccgttagccacacctccagtctcattcaacactggacagtttacaatgtggacaatgtagtgaatatggaaaaaggtttcagccaaaggcctaaccctattcaacaccagaaagtttacactggagaaaggccttagggtgacaggttatgtactgtctctgaatcaatatgacctcacttaaaacagaaactctgaggatggcctttatgagggagctggcaattgaacatcattcatctaaatatgcacactggaggcaagatgagaattcctgacagattgtccttcctgagaagacagccctctgccttggagctccagagagagggagccctgtattcttggctgtacccgtcgaatggagttttgatctcgctgagtttggagttgggggaggaaaggagtggtcttggttcaaatgtgactcacttttgctgttcttgtgaatgttagatcttctttaataaatatttatttcccatacacccttatgaccatttccagagactgaattgtgtttttataattttcacccttttggctgtgtaacaggtctgcaaagctcctcattcagttattctgtaagttgatccaaatgtttcaaattttaagaacttgccaaattgtgttctaaatggttagcatttcatatttcctcctggaatatattagattttccatttcttcacattactgacagtttatatgtgtagaagtcataggccattcattttagccatgttactaagtgtgaagtagtatttcattgtagttcttaatttgtatttttccgatgactcagttttgagcattttttaatgtgtttacttgtcacccatatatcttctttagtcaaatgtattttttgcctgttttttaaaacatttggttggttacaagttcttaatatttctggagacaaattccttatttgatataagcattgtcaatattttctcatggtccatggcttttgttttcttttcttttttaaaatttagagatgaggtcgtgctatgttgcacagactagtctctaactcctggcctcaagtgatcatcctgcctcagcctcccaaagtgctgggattacaggcatgagccaccatgcttggccttgttttcagttcttaacagtatctttcctagagcagattgtcttaattttatggagcccaatttatccatttgttattttattcattgtgcatttggtgttgcatcctcttactataccatatctttgcctataaataaaagccttgactgagtgcggtggctcacgcctgtaatcccaacactttgggaggccaaggcgggtggatcacgaggtcaggagattgagaccatcctggctaacacagtgaaactccctctcaactaaaaatacaaaaaattagctgggcgtggtggcggctgcctgtagttccagctatcctggaggctgaggcaggagaatggtgtgagcccgggaggcggagcttgcagtgagccgagattgcgccactgcactccagcctggggcacaaagccagactctgtctcaaaaaaaaaaaaaaaaaaaaaaaaaaaaaaaaaaaaaaaaaaaagccttatgtgagtatgctactgtaatcttatgaatctttttaaatatccaacttctgaaatatttgtaggtttaactacaaataaataattcaatatatagataaatgtgtacatattccctatctttactgagagcctagcaagccatggcattccagtagttttgagcacatttaatacccagttattggtttatatcattttttaataaaaggaaccagaactccttagagaagaggctgttttcaagttgtggcagaaaaggtacaacatgatttgaggaaatactgcattggaaaataaataaatgttcacagaataatgttgacatattagctttttattgctatcctgacaaatcaccacaaacttatggtttaaacaacacaaatataacagaagtctcactgggttaaaatcaaagtgttggcatgattatgttcctttctagagtctcagggaggatctgtttcttgcttatttcagttgttagcatatttaagttcttcgtggttgtaggactgagattcctttttcttgatggcatcagctgagggtcattcctaggatatataagaacttttatgaaaaaggaagaagtaataccaattgtatacaaacttccaagaggacaaaggttcaaagaattctggactatatgaaagttagcattaacaggacactaaagcaggcaatgacattaaacaaaactatagaccaataatcacatgaatatagacacagagccttaagaaaattttagcaaattgaggcactcgtccttcaaatcacccccttgggtctcttccaagcatacttgcctttctttcctgttctaaagcctttttaaataaacttgcactcatgctaaaacaaaacaaaaagacatttagcaaattgaatccagccatatacaaacaataataaatcataacctagtgaggtttatcaataatacaagtttgattcaacaattcaaactctttattaatctatattagcagactaaaatgaaaatctcaaaatgtaataaaagcattttacaaaattcaaaactaggttatgatacatgcaacaaattaaacaagatggtgatttcttcaacctgatacagcacatctatgaaaaacagctaacagcacatttgatatatatgtgatcaaatatttgataagctgattttccccaacattaggaataacataaatacgtcaacattcatcacttctcattaaaaaaaaaatctaatgattgtaaaggcagaacccaaactgtctgtatttacatatgacatgataatgttgaaaattcgaaattatctactaaaaagctactagatctaataattgagtttagcaaggtcctaagataaaaaggccagtgtataaaaagtaggtgtctctactaggttggtatatagctagcaaatacatgcttggcaactgaaaaaatgtacttcacaatagcataaaaatatgaaatatttagaaataaatttaacaaaatatgttcaagaactttaaaacattcctgagagacattaaacaaggcataaataaatgacacaagaagttcctgaatctgagacttaatactttgaagttgtcagttttcctttaactatcctaataaaaacctaatcttttaaataaaaatttacaaatgtattctaaaaagttacatggaaatacaaagggcctggactaattgccaaaacaattttataaataagaataagtttgaaaatctttatgactttaggacatacaaacgtacagtaattgagagtacagtattagctaaaggacagagatgaacagaagagaacagagaacccagaaatacactcacacaacactctattgtcaatctcttttcaagaaagttgcaaaagtagtaaaacaacttcagaaaacagtgtagcagctttaaaggtagcataagcttaccatatagtttaggaatcttacctattgggatatccccaagagaacaaaagcatatgttctagaaatacttacacttgcatgctcagcagttttatttataaaacccaaacaccagaatttgtttttaaaacacacacacacaaactaaaatttccgtgaacagaagaatgaataatcaattatggtatatcttaacataaaataccattcaacaacataaaagaataaactatgaatacaagtaaaaatatcatagataaatctgaaaatccctgagccaagtggaagaagccagacacaaaagttgacatacagtatgattccatttatatgaaatgaagaagctgcaaaactagagtaaaagaatgcagatcactggttattgagcctgcggtctgagggggaaggttctgactgaaagagtacaggaaaacgttatcaggcaatggtaattttctctatcatgactgtgttggtggtttcatgacagtacagctgacccttaaataacacaggtttgaaatgcacaggtccaattatatgtgaatgtttttcaataaatatactggaaaaaatttttgaatatttgagacaatttcaaaaaaccagaattcattgaaataggtatgccaagaatgcataacacaaaatatatgtaggttctattttatcattacaaaaccagagcgatattttcttttctttttttttgtttttgagacggattctctccctgtcgcccaggctggagtgcagtggcatgaactccactcactgcaagctccacctcccgggttcatgccattctcccgtctcagcctcccgagtagctgggactacaggcacctgctaccacacccggctaattttttgtattttttagtacagacggggtttcaccgtgttagccaggatagtctcgatctcctgaccttgtgatccacccgccttggcctcccaaagtgctgggattacaggcgtaagccaccacctccctactctttctacccaataaatatgaaggtctgtggaagctcagggcccttcctcactagaagcaagaagccccctgaccccttctttaaaacagatttattttgcctttgttttcatttctgcattcgttccccttcgttcagtcccatagtaactgtgacaggaatatggagcagaaatggatgaaggggagaaattgagggggagttggcttatgggtttgctgcctgttgttgtgcctttacaccaatgttgggtccttgaggaaggaaagaacacaaatgagaatggggtgaaagaggaacgtaaatccttgggctcccctactctctcatcacctacatccagaattcagagccttttcttattatcatacatcaggcattaatattgggtgtccccttgccaaaggaaatttaggaaggtatacgtggctttgcccagtgaaacctctttatggtggccctgaagatcctcttcaagtccttcaaaagaaggaaagattggagtatcagctgcaggaaactgaaatccaggcccatctccaattacaacaggttccagatgagtccgagagttctcgacactcatttctcctccatctcctactccatcatctccatctccatcttctccatcatctccatcttcatcatcatctccatctccatcatctccatgtccatcatcatctctatctccatcatctccatctccatcatctccatctccatcatcatctctatctccatcatcatctctatctccatcatctccatctccatcatctccatcatctccatctccatctcctactccatcatctccatctccatcttctccatcatctccatcttctccatcatctccatcttctccatcatctccatcttcatcatctccatttccatcatctccatctccatcatcatctctatctccatcatctccatctccatcatctccatcatctccatctccatctccatctccatcatctaccgtctccaatctccatctccgaagttatgcccacttcctcgaagtttggagccacgcgaactacactgcccagaaggcgccgcgccgtgagccgcgatgcttggccaatgaaaagaggtctacccgagagtgcgacgcgcaatgggcgggacttccggcgtctcccctcggcggttgctttcgctgccctcaagagaactcagcttgccggaagctggttgttcgctgcggcgaccagctccggaaagcgcggtggggacgcgctgtgttctcgcagctcagaggcgggtctgaggctcggtggcggcgcccagggtggcccgggccctttcctcggtcgttgtctcaccgccacaggctccgatggcggcggccacgctgagggaccccgctcaggtgagcgccgcgtcctcccggcctcccccgaatcctaaagccctgtgagggccgcctgctcaggtccccgggtgcagaactgtggggcgttcgtgggcggcgtcccgtttctgacacgcagtgtgatggggtggcaatggagggcaaggggcccggctcgcaaagatgtgaggcgcattcagcgagtcccgaacctgaggcctcctggtgtctgtagtgggcagcttgggaagggacgaggcgcgtgtcgagcgacagcccgagcagctgcgctttcatcctgagggggccacagtggccgcggagggctggagacagaagagtgacaagatctgtttctcaaagtttgccaaaggcccttcaagtcaaaacagactggggtgggggtgaggcgggtgaagacagacctgtgagtaggtaaattcagtagactagtggagagtctactgggactgggccacagaggaggggaagtgatcagatcttggatggatttcaaaaactgaacagacgggaattcctgttgcatcagatgtgactgtgaaagaaagtagggaatgaagagccattctggatttttatttgtatttttgtttgttcctgaatatcaggaaggatggagatgggtaaggctgtgcagggaataggttttgggcatggtgatcctgagatgtcccagagtggaggtgtcatgtccacatgagcagctggaaggcctggggctcgtatttaggagggagaatcttaaagttttctttcagatggtccctgaggtgagggaagggagagatgggcctgtaggatggggcagcctctacagcctggagtttcgtggtccgaagtgattttgtctggtgcctgcaggaatggagggttatagagtatgaacacccaggactggatggagaccgcagtgttgggtagtatataggtttgccactccaggcttagtagttcctcatgtccagtccatatggagaaaaggaaaggtcagccaggctggtggagcagcacctttggtgcctaagtttccctagctatcagcacaggtgggatgatcaactgctccagtagaagggagggctctcagcaggatggtcttcaggggagtatatagcaggcagccagattgccaaaaggaaacccacattgtctttctttttctttcttttttttttttttttgagacagaattctgctcttgtgatctgcccacctcggcctcccaaagtgttgggattacaggcttgagccactgcacccaggcagaaacccacattttgaaaacctaccagtttatttgcactgaaaatgttgacagaagcattaattatgtgtacagtaagagttgatatttagtcctagacacataagaatgagtttgatacaaacaatagtcctattgagtgaataccattattgccatgttgcagatggcaataccaaggcacagggaagttgagcatttttccaagggcacacaacaggtaagaggcatcactaagaaccaaagcccagattgcagatagtcaggcacacctgactccaggctagacgagggggcttggatgatcctttggtaacatcactgtctggttctcatggtcttgattttccataggttcttgtgacttcagagttagttatagaccatgagaaggtaagtggaggatgtctcaggccctcaccctcctcaactcctacctacatggtcttcagaattatggtgtcttgggactccttgctggctattctccctccccttccatttgagttccctgcaaaatggtcatacagtcagggtcctgagtccagactacatattattatttatttatttatttttgagacggaatttagctcttgttgcccaggctggagtgcaatggtacaatctcggctcaccgcaacctccacctcccaggttcaagcgattctcctgtctgagcttcccaagtagctgggattacaggcacgtgccgtcacgcccggctaattttgtatctttagtagagacggggtttctccatgttggtcaagcaggtctcaaactcccaatctcaggtgatccgcccacctctgcctcccaaagtgctgggattatagacatgagccatcacgcctggcccagattatatgttatatggagaggttctcatttctggcaaccaatgacaggagatttagaaggcatagtgatcaacattagaaaatacgtggaggtaaggttgagctgggaatgcttaggcaaccttagatctccattatgactgggggaagcatcagcaggtataaggcagacctgaagtggttggctgaggagctgggcctctattgtttgtatttttgtttgtttgttttttcctggatatcaggaaggatggaaatggggaaggctacacagggattacggcccaatcttaacaagctttttctgctttgagaacacctgtagggttaaaggtggaggctgggagtccagcaaagaggctactacagtagtctgtgtgagtgctggaccagagtggtggctgtggacgtaggagatgtggttgaagtctgcgttttttttgttttgttttgtttttgtttttttgagatggagtctcgctctgtcgcccaggctggagtgcagtggcatgatctcggctcactgcaagctccgcctcctggttcaagccattctcctgccttagcctcccgagtagctgggactacaggcacctgccaccacgcccagataatttttttgtatttttagtagagatggggtttcaccgtgttagccaggatgatctcgatctcctaacctcatgatccgcccgctttggcctcccaaagtgctgggattacagacatgagccacagcgcctagccagagtctgtgttttttaagtagatatgggcagattttctaaagtgtagggtgggagaaagaggttaatggtaagagtaattttcagtgggaataattaagttaggttttggccatgttgatatgagatgttccagagacccttgagtggattcattgagtgggcacctggacagagaagtctggagttcaggtgaagggttcagattggaaacccacatgatacagttggtgtatggaccaaatggagcagtggagcagatttaggagggagcatcttgaggtcctattggtaatgccattaggtaataagggagaatgtataggggccaagaactgggtctcttgcttggatacctggatgggagtggtgggtttcacaaggacatgagggagaatggtggccatggggaaagggatgtaggggtaaggagggtctgactagtggccaaagttcctgtggggatagacatgagatggacatgaagatgaagctataatgaggtaagatgacaggaaggcaggcactgctgcttattcatccaactgtgggatcacaaggcttttgtttttacctggacctggggagtttctcaggctgctggattagctcaagatcaaatgaggtcatctgagagaattgctgggcctggtttgggagacgtgggctttttttttttttttttaagatggaattttgctcttgttgcctagactagagcgcaatggcaagatcttggctcacggcaacctccacctcccgggttcaagctgttctcctgcctcagcctcccgagtagctgggattacaggcatgcgccaccacccccaggttaattttgtatttcgggtagagacagggtttctccatgttgttcaggctggtctcgaactcctgatctcaggtgatccacctgcctccgcctccaaaagtggcaggattacaggcatgagccaccatgcctgtcctggccttcgattctaatgagagtcagaggaacgctgacattgggcaggaacagcttttcaacacagaaatggaagagtgccacaggtgtccagatatgcgtgcagttccaagtagctgaaggtgaagcaacaaaaagagcccagtagagaggccttcaaagtggggctgagggttgcccctggtagtcagtgccattggaggtctaggaagggatggagttctgattgcatttggtgagtgccctctggatgccatgtgtagactagaatgtggtgacgctaggggaggcacataaggtggtgcagggggcagtggttgtggtacagagtatgtgcacattctaatgagtgtaaacagatgtccccagggaccttgtattgggtgcttcagggagaacactgacacaaatttgattgtatttgggaaacacaatctgggggatccaaggtgagttgtctggcaagagaagagtaggactctgcataccatgcccagagctgagatggactttatctgcctacctgcctctgcttgctcagtgggaacatgaggagagagtgggcatcagtggttctggggcagggtctctcttctgagatggggattaaggaagagggtgagcaggggtggatgtttagggggatgcctaaattccccagtaaggagaccgcagataaactcaactctgtccatcttagcagggctatgtgacctttgaggacgtggctgtctacttctcccaggaggaatggagattgcttgatgacgctcagaggctcctctaccgcaatgtgatgctggagaactttacacttctggcctctctgggtaaggttctcacaccccaccccagcatcctgagctggacttggcttttcctccttttcctagggagaggtctgttcttcccaaagctgaactgtgggcactcattccttctccagtatcctgaagtagctattgtaataggcctgggctgtgtatactaccaccttctctccctgagctgccccacagctgtgcaggaaagggtttgggggtcaggagtcttgcagtcagcttgatggatcttatccctggtggcctctctgtggcctggtgacactgtgcagatctgtggtagttctattcccctacattctgcctgtctcctctagccaacatacctgggtgtcggtctgtgccagcaattgagtcaccaatgtgattgctgtttgactgggttgttcctgcaagaccctcctccaaggttctttctgtactattttgttttctttcctgtggtccatgatgagataagtcattctggctcagtgctgccactcacctgtcgttttccttaggacttgcatcttccaagacccatgaaataacccagctggagtcatgggaggagcccttcatgcctgcttgggaagttgtgacttcagccatactgagaggtacttggtgggtggagctcagggaggtatgaactcgggtatgggtttgtatcataccaggagtctttccagtgggcccagatattttgataccaaggcaaggtgtcgtcgctgatttctatcttttcttcctcagtcacccatttatatctattctgatagttgacccagggccattccccacctctctgtactccatgtttcaccccatcctcagcagcacctttcagcagtggctttcactgaatgtgtggtgaggtggggcgcttattcttgcatagtccttggacaccaactatttcattccagttgttttttttttttttttttgacagagtcttgctctgtcgcctaggctggagggcagtggcgtgatctcggctcactgcaagctccgcctatcaggttgatgccattctcctgcctcagcctcctagtagccaggactacaggcgcccgccaccatgcctggctaattttttgtatttttagtagagactgggtttcaccatgttagcctgaatggtctcgatctcctgacctcgtgatctgcccgccttggcctccgaaagtgctgggattacaggcatgaggcaccgcgcccatcctgcagttgtttttttctggacctggatataaccttctgtgccgtgttcctgtgtctccagcagccaaaaccctgtggaaagccatttgcagaggattgtgttggggactctgcctctcctccttgtgctacaccacatccttgcatccttggtgctcatgaggcctccccaaatctgtgagctagccaggttcagcactgcacagcaggcccttccccaccaagcgctagccccctcattctgcaagcagtcccacacgctaattaccaggtgtgtcagacacgtgtgagagtgctgccttctcacaccaaagactacatttacttcatcaacatttctcttctttcaggtagttggcaaggagccaaggctgaggcagctgctgagcagagtgcttctgtagaagtgcccagttcaaacgttcagcaacaccagaagcagcactgtggagagaaacccttaaaaagacaagagggcagggtcccagttttgaggagttgcagagtccacctatcagagaagtccttgcaaagcagggaagttgggaaggatcttctgaccagctcaggtgttctcaagcaccaggtgactcacacgggagagaagtcacataggagctccaaaagtagggaggcctttcatgctggaaaaaggcattacaaatgcagtgaatgtgggaaagcctttggtcagaaatatttacttgttcagcaccagagactgcacactggggaaaagccttatgaatgcagtgaatgtgggaagttatttagccataagtccaacctttttatacaccaaatagttcacactggagaaaggccttatgggtgtagtgactgtggaaaatcctttagccgtaatgctgacctcattcaacaccagagagttcacactggagaaaagccttttacatgcagtgaatgtggaaaagctttcaggcataattccacacttgttcagcatcacagaatccacactggagtaaggccttatgagtgcagtgaatgtggaaaattgtttagtttcaactccagcctcatgaaacatcagagagttcacactggagaaagaccttataagtgcagtgaatgtggaaaattctatagccacaagtccagccttatcaatcattggcgtgttcacactggagaaaggccttatgagtgcagtgaatgtgggaaattttttagccaaagctcaagcctcatgcaacatcgaaaagttcacactggagaaaaaccttttaagtgcaatgaatgtgggagattctttagtgagaattccagccttgttaaacatcagagggttcacactggagcaaagccttatgagtgcagggaatgtgggaaattttttcgccacagctccagtcttgttaaacatcgaaggattcacactggagaaatacaatgattgtgagaaatcctttagctggtgtttcaacctcattcaacaccagaaagttcacagtgtaaaaaagtcttgaaggttactaatggaaatccattagctatacctccaaactcattcaacactggacagttcacagagtggacaatgtagtgaatatggtaaaaggcctcagccaaaggcctaaccgtattcaacaccagaaagtttagactggagaaaggccttagactgtcgctgaatcaatatgacctgacttaaagcagaaacagccaggcgtggtggctgacacctgttattctcaccactttgggaggctgaagcgggcggatcacaaggtcaggacatcgaaaccatcctggttaacacaatgaaaccacatctctactaaaaatacaaaaatttactgggcatggtggtgggcgcctgtagtcccagctactcaggaggctgaggcagaagaatggcatgaacctaggaggcagagtttgcggtgagctgagatcacgccactgcactccagactgggtgacagagtgagactctgtctaaaaaaaaaaaaaaaaaaaattagcccggcgtggtggcaggcaactgtagtcccagctacttggggggctgaggcaggagatttgcttgaacccgggaggcggaggttgcattgagccgagatcacgccactgcactccagcttgggtgacagagtgagacttcgtctcaaaaaaaaaaaaaaaaaacaaaaaaaacccagaaactctgagggtgatctttatgagggagctggcaattgaacatcattcatccaaatatgcacactggaggcaggatgagaattcctgatagattgttcctcctgagaaaatagccctctgtcttggagctccagagagagggagccctgtattggctgcaccagtcgaatggagttttaatctcactgagtttggagttgggggaggaaaggagtggtctcgattcagatgttactcacttttgctgttcttatgaatgttagatcttctttaataaatatttacttgccataaacccttatgtccgcttccagagactgaattgtgtttttataattttcaccagtttggctgcgtaacaggtcggcaaatctcctcactcagatattctgtaagttgatccaaatgtttcaaattttaagaacttgccaaattgtgttctaaatggttagcatttcatatttcctcctggaatatattagattttccatttcttcatattactgacagtttacatgtatggaagtcataggccattcattttaaccattttactaagtgtgcagtagtatttcattgtagttcttaatttgtatttttcgaatgactcagttttgagcatttttaaatgtgcttattcgtcacacgtatatcttcgttagtcaaatgtcagttggtattttttgcctgtttttttaaaatatttggttgcaagttgttaacatttctgaagacaaattccttatttgatataagcgttggcagtattttttcatggtctgtggcttttgttttctttctaaaaaattagagttgaggtcttggtatgttacatagactagtctctaacccctggcctcaagtgatcatcctgcctcagcctcccaaaatgctgggattacaggcatgagccaccatgcttggccttgttttcagttcttaacagtatctttcctagaggagattgtcctaatttttatgaagcccagtttatccatttgttatcttattccttgtgcatttggtgttctattctcttactataccatatctttgcctataaataaaagccttatgtgagtatgctactgtagtcttaggaatctttttaaatatccaacttctgaaatatttgtaggtttaactacagataaagaatttgatgtatatagataatgtgtacatattccctatcttttgtgagatatcctagcaagcagtggcattccagtagctttgagcatatttaatgcccagttattggcttatataattttttaataaaaggaagcagaactccttagagaagaggctgttttctggttgtggcagaaaaggtacaacatgagtctaggaaatattgcattggaaagtaaagagatgctcacagaataatgttgatgtattagctttctattgctatcctgacaaatcaccacaaacttacggtttaaacaacacaaatatattatcttacagttctttaggtcataagtataacacaggtatcactgggtgaaaatcaaagtgttggcatgattgtgttcctttctagagtctcatggagaatctgtttcttgcttattttgagttgttagcatatttaagttctttgtggttgtaggactgagattcctttttcttgatggcatcagctgagggtcattcctaaaacatgtaagaacttttatgaaatattaaaggaagaagtaataccaattatatacaaactcttccaaaaagagaaaagttcaaacacttctgaactatatgaaagttatcattaacaggacagcaaagaggcaatgacataaaactatagaccaataaccacatgaatatagacagagccttaacaaaattttagcaaattgaggcacttgtccttcaaatcaccccgctgggtctcttccaagtatacttccctttctttcttgttgtaaagcctttttaaataaacttgcactcatgctaaaacaaaacaaaaagacatttagcaaattgaatccagccatatacaaacaataataaatcataacctagtgaggtttatcaagaatagaagttagattcaacaattcaaactctttgttaatctgtattagcagactaaaatgaaaatctcaaaatgtaataaaagcattttacaaaattcaaaactcggttatgatacacacagcaaactagaacaagatggtgatttcttccacctgatacagcacatctatgaaaaacaaacagctaacagcacatttgatatatatgtgatcaaatatttgataagttgattttccccaacattaggaataacataaatatgtcaacatttatcacttctcattaaaaacaaaaagtcttaagattgtaaaggcagaacccaaactctttatttacatataacatgataatattgaaaattctaaattgtctactaaaaagctactagatctaataattgagtttagcaaggtcctaagataaaaaggccagtgtatacaaagtatatatcactattctaagttggtatatagctggcaaatacatgcttggcaactgaaaaaatgtacttcacaatagcataaaaatatgaaatatttagaaataaatttaacaaaatatgttcaagaactataaaaataaaacattcctgagagacattaaggaaggcataaataaatgacacaagaagttcctgaatctgagatttaatatttttaagttgtcagttttcctttaactgttctataggttgagacgatcccaataaaaacctaatcttttaaataaaaatttacaaatgtattctaaaaagttacatggaaatgcaaagggcctggactaattgccaaaacaattttatttattttattttattttatttattttttttttttttgagacggagtttcgctgtcacccaggctagcgtgcagtggcatgatctcagctcactgctgtgtctgccccctgggattcatgccattctcctgcctcagcctcctgcgtagctgggactacaggtacccgccacctctcccggatacttttttgtattttttagtagagacggggtttcaccatgttagccaagatggtctcgatctcctgacctcgtgatctgcccgcctcagcctcccaaagtgctgggattacaggcgtgagccaccatgcccggccaacaattttataaataagaataaatttgaaaacctttatgacttcaagacttatgaatgtacggtaattgagagagtaaagtattagctaaaggacagacatagagatgaacagaagagaatagagaacccggaaatacactcacacaacactctattgtcaatctcttttcaacaaagttgcaaaagtagtaaaacaacttcagaaaacagtgtagcagctttaaaggtagcataaacttaccatatagcttaggaatcttacctatagggatatccccaagagaacaaaaacatgtgtcctagaaatacttacacttgcatgctcagcagttttatttataaaagccaaacactagaagctgtttttcacacacacacacacacatacacacatacacacactcaaaactaaaatgtccatgaacagaagaaggaataatcaattatggtatatccttaaaataccattcaacaacataaaaaataaactatgaatacaagcaaaaacagcatagataaaaaaaagccctgagctgagtggaagaagccagacacaaaagttgacatacagtatgattccatttatatgaaatgaagaagctgcaaaactagagtaaaagaatgcagatcactggttattgggcctgtggtctgagggtgaaggttctgactgaaagagtacaggaaaatgttatcaggcaatggtaattttctctatcatgactgtgttggtggtttcatgacagtacagctgacccttaaataacacaggtttgaaatgtacaggtccaattatatgtgaattttatttcaataaatatattggaaagttttttgaatatttgagacaatttccaaaaaccagaattcattgaaataagtatgtcaagaatgcataatacaaaatatatgtaggtactattttatcatttactaccataaaatatacataaatctattatacaaggttaaaattagtcaagagtcacataaacacagactgtacttggtgcttccagagaaatgtaaacaaacacaagatgcagtattttttttttttttttttttttgagatggagtctctctctgtcaccaggctggagtgcagtggcatgatcttggctcaccgcaacctctgcctcccaagttcaagtgattctcctgtctcagtctcctgagtagctggaactacaggtgtgcaccaccacgctgagctaatttttgtattttttagtagagacagggtttcaccacgttggtctgtgttggaggtcaaaagaattagggtcatgaccaactcagtatgccactggagactatatgagcaaacaacaaactagtctcatgaatgcagtatgttggcaagcctacaactgtgtctgcagccagatggaatgctaagggcagtcacaccccaggtgcagtgttccttgtggttatctacaggaacatctggagtctgttgtataaagaaagcaattatgtgagcctgtgataaatcaagcagctgaccaactgttacgtcttcctctctgtggattctacctaataaatacaaagggctgtagaagctcagggcccttgttccctagaagcaaggagccctctgaccccttctttaaaacagatctttttgtcttcatttctgcatttgtccttcttcattcagtcccgaaccgacagccacaagtggcgcccgaacagggacgtgagtgaagaaggtctgctggagcagagaaagtgaaactgaccagaagaatgagaaaccccaggacaagtctgctggcagtggatataaggtcagtgccctaaagaggtactgggagtgggaagtttctgaatcagggtaacatagggcagaatttgtctgctgaagagcaacattatatgcagtcacttaaaggtttacttaaacaatctggtgctcaggttagttctcaaacactagctaagctgctgcaggaggttatcacgcataacccatggtttccacagacagacactcttgatgtggaaaactggggtgaagatttgcttacggcataggatatgagacttacaaattaaactattggcaatccaggatttaaaatgttaaagaaaatgagatatcagagcagacaaggcttaggaaagtccctacaggaaaaccctgatcctatatcaataactgggcaaacagatagaaaagggctaggtcgtcagatttctgatgtgggtcattgatatttctcctccacccactgctttgccactagagtggctaacaaacctgtatgggtggatcaatggcccctttcacaggagaaactaactcaactccatcagctagtaaaagagcgattggatgcaggacatattgaagagtcagcccctggaattcaccagtatttgtaataccaaaaaagtcaggaaaatggggactgctacatgatttgagagctattaatgcacagattaaaccaatgggtgcattacagcaaggtctgccatccctggcaggcatttccaagagactggcctcttgtagtaatagatcttattgttttttttactatactattacatcagcaggataggcctggatatgccttctctgtgccttctgttaatcaaagggagcctgtctcttgttatcaatggaaagttttgccccaaggcgtgcttaacagtcctacattatatcagaattttgtaggacaggcattaaaggagccttgtaatgtgtttcccactggctatgtcattcattatatggatgatattcttttggccgctcctacagatcaaatcttacatcagttattcagagaaacaaaacaggctttgactaaatggaatctcaaaatagctcctgaaaaggtgcaaaccacctccccataccagtacttaggcactattattactgaaagaagtgttcagcctcagaaagtagtcatctgtagggacagattacaaactttgaatgatttccaacaattatcaggggacattaattggctgcacccaatgctaggtattgctacttattaactcaaacacctttatcagaccctccaaggagattcttcattagactctcctcggcaacttactaaggaggcagaagctgaattatagcttgtagaacagatgcttcagcaacaacatgccacctggttacagccacaaaagcctttgcttctgtttattcttcctacctcccattctccaacaggacttttaggccaattcatacacaaatctgtaatagtattagaatggcttttttatccaatcagacagtgaaatctttgcaaatttatctttctttaattactcaacttataacaataggtaggcatagatcaaaaatgtttatgggatgtgatccagacaaaattattgttcccttggattcccaacaacaggccacagcatgggaaatgtcgactgcatggcaaatcactctcacagattttgtaggaataatagataaccattatccatcagacaaaattttgcaattttatgaagttcacccttttacccttcctgtaatcactcatcacaagcctattccaggcagacagacctattttactgatgactcttctaaaggctgtgcagctatttatggacctaagcatactgaaacaataaagacctctggagtttcagctcaatgctcagaattagtggcagttattcaagttttacagctcaccgctttatctcctattaacattgtctgtgattcagcctatattgtaaatgtagccagtcacattgagactgccactattaaaagcaccctagaaccagagctgtataatttgtttctaagacttcaacaagctgttcactctcatgctgctccttttcatatttctcatatttgctatcacacacaacttcctggaccactatctctaggtaacaataaagcagataaactaatcggttctgtatttcaacaagcccaatcttctcatgcattcctgcatcaaaacacctctgcccttactcgtatgtttcatctgccttgcagccaggcttgagctattgcgcaagcctaccccacttgccagcctgtccctggcgttgcacccatggaaggatgtaacccactaggcttggctccatatgaaatctggcagatggatgttacacatatagcagcctttggcaaactcagctatgttcatgtgactacagacacttactcccatatgctacatgtcacgtgccaaactggggaaacagctggtcatgtctgatgacattgtctgtcaccttttgcccatatgggggtccctacacaatgaaaaactgacaatggacctgcttatgttagtcatgcttttcaaaattttttacagttatgggcaatcactcataaaacagaaattccttacaatcctcaaggacaaggaatcatagagtgggcacatcaaacattacaatgcatgttgaaaaaacaaaaatggggactaggagaccagctaccacctcaaacaaaattacatttagccttatttactttaaattttttgactcctggtatggatattaagactctggcagaatgacattggcaaatgttagagggaaaaaggaaagtttacccaaaggtattacagaaatccccggaagaaggacaatggaaaggcccggtagacttactgatatggggacgagggtttgcttgtgtttttacaggagatggacaatccgtgtgggtgccctcaaggtgtgtgtgaccatggaacgggagactggagaaatccatggatctcaactgtgggcccagctcctccagtacgagccatgagctagttgaatctgaatgcaaagacagaacaaggaccgactggagtcacactgacatcaacccccataaaatggggacagctcaagaaaaccacacaggaagctgagaaactgctggagcaaaacccctgactccatgtttatggccatgctagctgtaatatcctgtgcggtatgttttccctgtgcagaggcaaaaacttattgggcatatattcctaacccaccagtagtacgaccggtactcgggagcaacactcctcctgagatatatcatgatcagggagcatggacaccaggacccctaactccccctgacagagagtgattagattctcagaacaatggtatcaattatactgcaccattggagggacttctttatgtgtcacccaggatgcatcactcaaccgcagttgccttgcaattcagtcccaagcatgcttgagttaccatggaaaaattatgtacctattaggccttagctctattaatattactggtgtagttactaatcactcctggccccatcacccaaattgtattgattgtacagaatgggctccctttgataattctcacccctgtccttggactcagtgtcttggccccttagctaaacaacagtccatgttaatgggagacattatcgactggggtccccatggtcatttagatgggagaagtgagaatcagacctcatggcataaattttgctggcactggtggcgaaacttgaacatctcttcgctacatcccaatctgctacacaacttgcttggcacagaatgggctttagcccacctttgcctcaatggcattatcaaggaaagagaggtccaattcaggagtcaatatggaagacagcactcccatttatgaatggcagcatttgggttgggacactatccaataatagtaataatgctcaatgcagttttaatgttacctttgtagaaaatactaccacacagtttacaatttgtatttttaatccgtatgtttttctagcagcaaaaaaggaccaactccgggtaaacaatgcccaatcgatttgtgatgcctgtcaactgtatcattgccttaatcatagcacaatacaaacacacagcatatccaccctaataattctaggtcacattcctggattatagattcctgtaaatctgtccgagccttgggaggccacccccgctttacattttgtaaaactccttcttattcagcttactcatcgtgctcgtagagctttaggcatgataatttttgctataatttccctagtcacactaataacctctgctgtgttgtcctcagtagcactgcacagctccattcaaacagctcaatgtgtgaaaaattggatgtgcacagccgaccaggaatggatgcttcaaaataaaattaacaccaagatacaaacagaagtggcaatgttaaagactactgttctgtggctaggataacaaatacaaagcctgaagttgcagcagcaattgcattgtcattttaaccctattcatatttgtgtaactaatttggaatataatcaaagtgaatatccaaggaactttgtaaaggcccatttacagggagttttacattcaatgttacttttgatattaatgattcacaaagtaaaatccttaacttgaataagcagactcaagtgcttcagccctctttaaaagcttgggcagaattccagcaaggtttagggagccttaacccttggacctacttcaaacagcacctcaatgtcttttttgtgattatcggaataatgttattatgtttctgttttttgttcatagtctgtaaaatcagctggaccaccaaccggcaattgagagctgcacagcctgcaattacctttattcaattaatacaaaaacagaaaaggggggaggttggaggccgaaagaatgagggtcgtgaccaactcagtataccactggaggctatatgagcaaacagcaaactgttctcatgaatgcaggatgctggcaagctgacaactgcatctgccaccagaaggaatgctgagggcagtcataccccacgtgcagtgttccttgtggttatctataggaacatctggaggctgttgtataaagaaagcaattatgtgagcctgtgataaatcaagcagctgaccaaccattacctcttcctccctgttgattctacctaataaatacaaagggctgtagaagctcagggcccttgttccctagaagaaaggagccgcctgtctccttctttaaaacagatctttttgtctttgtcttcatttctgcatttgttctcttttgttcagtcccaaaccgacagccataggccaggatggtcttgatcttttgacctcatgatctgcccacctcggcctcccaaagtgctgggagccaccacacccagccaaagatgcagtattaagtcataatcgtgcatgtgtgtatgtgtgtgtttgaatagacagagtctccctctgtcgcccaggctggagggcagtgacatgatcatagattgctgcatactcaaactcctgggctcaagtgatccttctgcgtcggcctccccagcagctgagaccacaagcacatgccaccacactggctaattttaaaatgttttctgtacaggctgggcatggtggctcacacctgtaatcccagcattttgggatggttggcaggtcccagaagtttgagaccagcctgggaaatatagtaagaccccatctctacaaaaaaacaaagacaaattagctgggtatggtgccacgcacttgtggttccagctactcggggagctgaagtaggagtatcacctgagcccaggaggttgaggctgcagtgagctgtgattgtgccactgcactccagcctgggtaacagagtaagaccctgtctcaacaattttctgtagaggcaggggtctcgctatgttgcccaggctactctccaactcctggcctcaagcaatcttcccaccttgagctcccaaagtgctgggattacaggcataagccatcatgctgggctgataaaattaactacaggacatactacagtaccataataattttgtagacatctcctgttgttcacagtgttgtgagtattcacttaaagaaccccatgatgttaatcatctccacatgagcagttcatctctccagtaaatcacatattgcagtaaaaagtgatctctcaaggttctaatatattattcatagtgtttagtgcgatattgtaaactttaagtaacgctatatggcctatatgaagtgccagtagtgatgctggaagtgctcccaagaagcagggaaaagtcatgacattataagaagcagctgaactgcttgatatgtactatagattgaggtttgcagctgtagttgcccaccatttcaagataaattaatccagtatgaggatcattgttaaaaacaaacaaaaaaggaaataaagacattgctgcagctatgccagcaggcacaaaaatcttgcattttctgcaaaatatatcttttatctcatttaaaaatgcagctttcatgtgggtgcagaattgccatgggtaaggcatacagagagactcaaatacgatttgagaaacagtcattatatgacaactcaaagcattaggaaggtgaaggatctaaagctggagaatttaatggcagcaagggaaagtttgataattttagaaagatgtttggctttgaaaatgtcaagataataggagaagcaacttctgctgactacaaggcagccaacaatgtcccaggtgccattaagagaaccactgacaagaaattatatcaacctgaacagatttgttttttgttttgttttgtttttgagacagagttttgctcttgttgcccaggctggagtgcaatggcacgatctcagctcactgcaatctccacctcccaggttcaagcgattctcctgcctcagcctcccaaagtagctgggattacaggcacccgccaccatgcccagctaatttttttgtttttttttagtagagatggccatcttggccagggtggtcttgaactcctgacctcaggtgatccacccgcctcagcctctcaaagtgctgggattacaggcatgagccactgcacccggcctgaacaggcttttaatgcaaataaagtgccctgttttgggaaaaactgccacaaaggacatttattagtaagtaagagaagaacataccaagatttaaaacagaaagggataggctaactccagtgttttgttcaaatgtagttggttttatgataaggactgcccttatctataaaactgctaaccccaaacccttgcacaagctgtcagtcttttggttgtacaacaagaaggcctggacaatgagaaccattttttctgggttgttcccattaatgctttgttcctgaagtcaggaagtgccttgacagaaagtaattgcctttaaagttcttttgacattgtacaatgcccctggccagccagaaccccatgagatcaacaccaaagttgtggaagtggtctacttgatcctaaacaccctctaatttggcataaagatgatggagtcataagaatctttaaattaggatccctaatccccacattgttcaagggtcaactgtatatattgaccagtattcattgaactgtacattttaaactggcaaattttattgtgtgtaaattacacttcattaaatctgcttaaagagaaaaaaataatccatgagtccacagacataaatgaatgaatgaatgaagtaggaaagaaaaagttatactttatagtaaaatgtcagttaaaatagatggagatagaaaatcatcaatgagagctaaactggtgaagtaaaagattaatgaggaaaaggagttttatatatttctaaagaatctttcttctggccgggtgcggtggctcacgcctgtaatcccagcactttgggaggccgaggtgagcggatcacgaggtcaggagatggagaccatcctggctaacacggtgaaaccccgtctctactaaaaatacaaaaaattatctgggcgtggtgatgggcgcctgtagtcccagctactcgggaggctgaggcaggagaatggcgtgaacccgggaggcggaacttgcagtgagccgagatcgtgccactgcactccagccagcctgggcgagagagagagactccgtctcaaaaaaaaaaaaattttcttctatttatttgcatttatatagaaaaaacagtagagagaatgtaaacaacccagtcaggaggagactccaacactgaaaaaaattcatgagtaccatatttacatgttttaaaatcatatttcgtcagaattatattttcacaacgatagatatggtaaaaatgattttgcactttcttacagtaccacaaaacattttaatggagcaagagatttctttttttttttttttttttttgagaaggagttttgctcttgttgcccaggttggagcgcaatggccctatctcggctcactgcaacctccacctcaccggttcaggcaattctcctgtctcagcctcccaagtagccgggattataggctcctgccaccatgacaggctaattttttgtattttcagtagagacaggctttcactatgttggccaggctggtcttgaactcctgacctcaggtgatccacccacctcggccccccaaagtgttgggattacagacatgagccaccgcacctggcggagtgagagatttctaaccataactgagattttgcttattcatataacttaatggtttatgttacaagataaataaaaatgattagtatttggttaaaaaattttaggctggacacggcctattatctaagaaattagatatatatcttgcatacaaattcattactagctgtgttatttgtagatattttatgctaatcatttgtagctcctctttttaatgttaacaagatattttgaagagcattgcatttaattatgagaaaatctaatttcttaattttcctgttacagtcttgtttggtgtttttatgtaagaaatatttgcttcactatgatcacaaagattttcctccattatctcctagaagttgtatggtttggccgggcgcagtggctcacgcctataatcccagcactttgggaggccgaggcgggcggatcacgaggttaggagatcaagaccatcctgactaacatggtgaaaccccgtctctactaaaaatacaaaaaatttagccgggggtggtggcgggcgcctgcagtcccagctactcaggaggctgaggcaggagaatggtgtgaacccaggaggcggagcctgcagtgagccgagatcgcgccactgcactccagcctgggcgacagagcaagactcagtctcaaaaaaaaaaaaaagaagttgtatggtttttggttttacatttatgtctatgaattatttcaagttaatttttagcatagaacttgctggaacatgggttaaatggtcaggaaaagtggtaaattaaggataaaaattgctacattctttggaaaatgaaagcaaatagcaagatgatagtgttattcatagagatgaaagtgactgttagacttggtgataaaagctgagaaaactgctcattttggagcacatttaaatatctatcacagaggcaaattggaaggtcagggaaaaaaattggaaaaatgaatctagaactcaggtaacagtaaggatggttgggaaggtttaaattagtaaattggaagatttcatagaaaactcatgaaggttaagtgacctgaggatgcagaagtgaccactgggctaaagtgaagaacaaatatggagagaagtggcaggcttgcatgatacacatgcgttcagtaaagcaaacacatcacaacccagtgagtattctcaatatcagcacatctcttaaactagcaccacaatcaataatgaaaatccccttcattcaccaatgggttctaactcctagaatttatgatttctagtgctctgtattctaacatatattttgctcatctttgcattttgtactcttttgcttaattctcagtggcatatcttcatttggagagatgtcttttaagtctagtggtggcttcttgtcatcctggtcctactcctcctcttcctcgtgttcctcttcctccttctgttctttctcttcctgctccttgtccctttacatctttatctttatttttaccttcatcttcatattctttttcaccagaaatccctcaggttgaccaagatggtggtatgtagctatatgtgccacatgtggcctggagtgtaggactggtaagatgtgactcataacaatatggatagacgatgtaattctgggtttaaaaaaaaaaacctctgcatgacctacacttcagaggcccttagagcttcctcagtaaatttctgttcatttgtgtctctttgggttggtttcctacctggggatgtgacaacatggatcacaggcgttacagtttcaaggtacatttccatagaagaggatgacaaaataattgcctttacatagaaaatgagtcataggaggtttctctttggaattcttaattgtttaccaacagtttccctaaatgcaccaagattccaccctcacatatgtggcactaggctacacgaacttccagctatgacaggaagcatttaagtttctgctgtaaaggaaagaagagattcggggcagaaagcgtcctgactctggggcattactgaactcccctgctgaggaaggaattttggggccaaacagcaacaataagtctatcaagcgtatagcaaaaatattcctgatagtgtcacatgccccacaatatagagatatctaaggataattaatatcaaggtctgaagtgagataattatggtgggcctagaatatgtgaaaacaatgtcacaggaatggcaagaaccaaatgaacagaaataatagagactgataaattatttcaagtcctactctgagtaattactcatgcatcacaacaagaatgattacttcaaactttctgataactatataaacacatgtaaagaaggaagcaatattttccgtattatggattctttgcgtagctttctgaaattcaaaactaaatattgcaagctaactaaaagagatggaatttcttctagaatatcaaccaatacttcaagaaagttgtttaaaaatagcagaaaggtcaatataataaaataagtcaatatcaatattccactaaatcatatttaatgcagatattcatttatattttaaacagtcaatacgtaaagtacctacctgattgttcactttaaagctggtgcaaattaaagtaatatgaaggataataatgctttgcagattactctttaaaaataaatgaaagagatatttagagaatatgtgaacttttagaaaaacacaaataagaaaaaatgtgacaaagtttgaatgaagtaagatttattcattcgtttatgtatatatttacttctgaggcggagtctcgctctgtcgcccaggctggaatgcagtggcacggtctcggctcactgcaagctccgcctcctgggttcacaccattctcctgcctcagcctcctgagtagctgggactacaggagcccgcgaccacgcccggctaaatttttttgcgtttgttttgttttgtttttgtttttgttttttttttgagacggcgtcttgctctgtcgcccaggctggagtgcagtggcacgatttctgctcactgcaagctctgcctcctgggttcatgccattctcctgcctcagcctcccgagtagctgggactacaggcgccaccaccacgcccggctaattttttgtatttttagtagagacggggtttcaccattttggtcaggctgtctcgaactcctgacctcaggtgatccgcctgcctcggcctcccaaagtgctgggattacaggcgtgagccaccacgcccgacccgtaaaactcttaaaataagaggatcatggccgggtgcagcggctcttgcctgtaatcccagcattttgggaggctgaggtgggccgatcacctgaggtcgggagttcgagaccagcctgaccagcatggagaaatcccgtctctactaaaaatacaaaattagctgggcgtggtggcacatgcctgtaatcccagctactagggaggctgaggcaggagaatcgcttgaacctgggaggtggaggttgcagtgagccgagatcgtgccattgcactccagcctgggcaacaagggcgaaactccatctcaaaaaaaaaaaataataaaaaaataaaaggatcagaaataaataatagtggagacaaacgattgtgatgccctaccttgttttaacctgattgtctctctcagctgagagagccaaacagactccatttttgtttcttcacttgcagcccccttatccccctcccttaaggacataactagtgcaagctgactccaagcacatccaggaatgcacttactgatagacactgaggcacgctgtaccagcagctcctaggaacgcactcagttaatggtacccaaagcccctgcgtttatcactttgtgataattaagcccctgcacctggaactgtttattttcctgtaaatgtttgtgtaaccatttatcttttaactttttgcctgttctgcttctgtaaaaattgcttcagctaaactccccctcccctatttagatcaaggtataaaaagaaatctagccccttcttcggggccaagaattttgagctctagctgtctctcggtcgctggcaataaaaggactccagaattagtctcagagtgtggcatttctctataactcgctcggttacaacactatagccaaagattacattcataaagatatttttacaatataggtgtcttatttaatatgactccaatctaaatggtaatttttctaacctttcttaagtaattataaaatgtcaaaattataaacaattaaaaactaaagagaaatgaagacaatggatagcaacaaaagctaattgctaaatatgggggaaaaaagccaggcatggtggctcatgcttgtaatcccagcactttaaggcaggcgaatcacttgaggccggttctagaccagcctggccaacatggtgaaaccctgtctctactaaaaatacaaaaattatccgggggtggtggcgcatgcctgtagtcccggctactcgggaggctgaggcaggagaatcgcttgaacctgggaggtggaggttacagtgagcagagattgcaccactgtactccagtctgggcgacagagtgagactctgtcaaaaaaaaaaaaggaaaaaaagaaaagaaaaagaagatataatgtttctgcaatctcatttcagttccacttatgataatagatacattatgtaatttaagtcactaacacttgagggcaaaaaaacagaataaacacaaacgtgtgggataaggggatgctgaccccactgttagtgatcaccttggttggagacccaggttttatcatacagatgaagcctgcaggtagcaagtttcagagaaatagattgtaaatgtttcttatcagacttaaggtctatgctgatgttattgctgtaggggtagaatgaggcatgtccaaccccttcttccataatggcctgaactagattttcaggttaactctataatgctgagaggagggggtccattcagatagttgggaggcctttgaattttatttttggttatagtttctacattaaaaaaaagaaaaaaattaagggtcgcgtcaattctcaattgtcaacatttttaatgtattgtatgcaatatatgtcaacttttgtgttgagaaatgaagatcaaatcgtattcttttatcctgtgtatgtaataggctttgctgaccctagtttgatgggttttttcctttgtcctctctttcttggattgagtcctcacagcgcggcggactgcggcgtggtaggaactacaccacccagaatactgtgcgccgagcgtgccggggccttagaccaatcattgcccaggaaaggggcacctccgtaagtgcgcaatacgccagaatcttccggcgtctttccggtggtggtcgtttttgctgcctgcgagcgcgtccgcgggctgggcgtttccggctcgctgggtccgggccaggtaactggagccggaaaccggtggaggtggtgtccgcccgcagaggagcttgcctggtctcggtctgagcgtcgcccagcgatttgccaccgcacgcacgccggatcccgggctttaccgcccgcctttccaggccccgccccgcctaaagtcccatggccgaggcagcgctagtgattacgccgcaggtgagagcggagtcctcggatcctcacctgggtcctgaggccccggactggggtcacctgcgtgggtctctgcagttcaggcctcttctccaggacagcgaggagttctgggtggggtcctcagagctgacgggcggtgaggtgaagaagggagagcgttgcgtaccgtgggggctgcacgcgcagagcctgggaggtgcgccggggtcgcgagcattcggaaacttgggggcggacctgtgtctgcagggagcagagagaatgaggagaagaaggcacggctgccatggcagcctgagcaaccggggtttttaattctgagtctttgggagccatggagggttgtgaactaaaggagaacacgatctgagtgagggtctgaaaaaatatttcaaaggcaatgagtggagaaaacagactgttacggagtgatgggggtggacgcagggatactggtgaggagactgctgtagtaggctccaggaggattatggtggattctggaccagacgggttgctgaagggacctaagtaataagaatcttggtagatcttaaaggtaaagccagcaggattttctgctccatcatttgtgcctatgagcaaaagtgggagtgaagtatgatcccaagtttttcttttacctgaacatctggaagagttgacaaagaaatctggtgagggagcaggtttcagggaaatagtaggagttgaattttggacgtggtgtttctaaattgccacagagtgaagttgttacatgggcagttggaatcataagtagaaaattcatgggaggggactgactcagtgatgtgtaaatggagacaggctggggcgtagactcaagccaagccttaaatttagacgggaaatcttaaggttttactttgagatgaagagagggagggctgaggctggaggctgggaaagtgtgggtcggccttggcgaagctgcctgcagataggagggccatggggttccgggggtacttccaaagggaatgtgtaaggaatacacactgcataggatggatttgagggtgggacactgtgtagagtcaccattcagaagacttggcgaactgttcactctatgtggagccagagaaaggtcagccagactagcagagaagcccaagcccagcaagagcagctctcccaggaaaatacaagtttagactgtatagatttaacaaattaaatttatgcaagcaattagttaaccgaataaaatgtcactataactctgtgctctaataaaaaataaatgtttgttttttgtcatgctttcctggcacagaattcctaaaatcgttgtaatttcctcagtgaaaagtgtcttgtgataagtcatggaccgcataacaacagtgttgaccacatcagtgacggtggtcccataagattatgataccatatttttactgtaccttttcattttctttctttctgatcaggaggcaaactgcattttctaagtttataaatgtttaaatgcacaaataattatcactgtgttacagttgctgacagtatttagtatagtaacttgctgtacaggtttgtagcctaggagcaataggctataccatttagtagttgaacaatgaatgtctgaacagtagttcccccttatcctcagaggatacctttcaagaaccccagcggaggcttgaaactgcagatagtacccaacctatatatactatgtttcttcctagactacatacctgtaataaaatccagtttataaatgaggcagtataggagatgaacaataataactggaaataatatagaacagttatactttataagttaataaaagttaagtaactgcagttgagacaataaaaaagcaaaagttaaattataaaaaacatgtgaatgtggtatctctctaaatatcttactgtactattcacccttgtgatgaagaagggactaaactcgatagagtgagatttcctcacactacttacaatggtgcactgttggccagcgcagtggctcacacctgtaatcccagcactttgggaggctgaggcaggcagatcacaaggtcaggagatcgagaccatcctggctaacatggtgaaaccccgtctctactaaaaatacaaaaaattagccaggtgtggtagtgggcgcccgtagtcccagctactccggaggctgaggcaggagaatggtgtgaagctgggaggcagagcttgcagtgagccgagattgcaccactacactccagcctgggcgacagagcgaggctccgtctccaaaaataaataaataaaataaataaataaataaataaataaaggatggtgcactatttaaaacatgaattgtttatttctggaattttaatattactattttcagactgaagttgaaatttaatacttataattttcacactgaagttgagtgtgggtaactgaaactgcaaatagcaaaacagctgataagggaagacttctatacttgagttttatgagatggcttagggtgagcagacaaggtggagtctctagatagcctcagagtggagtcagtcaccagaaaaatcaagtgattatagaatttgaactttgagccccacctctggcatccagggaggggagcagagatctggagattaggttatataaaatcttgaacaatgagttctagaagcttcaaggttgtgaacacttggaagtgctgggagagtgacgtaagagagcgtggaagtactctgccttaccccctctcccagtaccttgccatatgcatcgcttccatttggctgttcctgagttacatccattatcataaactggtaaacataagtaaaatattttcctgagttctgtaagtggttctagcaaattattgaacgtaaggagagaggtcatggcagcccccaaatgtgtagccaagtggagaaaattacagtggtctggacattggcttgcaattgccatatgaagtgagggcagttttgtacgactgagcccttaaacctgttggtttagctgcaactccaggtagttagtgttagaataggattgaattgtaggacacctagttggtatcagaatcagagaatggtgtgggaaaagacactacatatttattatcaaagaagcacagaagcctctcataatttgaaaagataccacattcacataaagacttaaatggcaagtaagaaacaccagagttttaaaaaatgtttacagaaatcttaatgcaatagtcagtactagctaaatcttagcattggacacgtatgaatgagtttgatgcctacgatggcactacgagatagccaccattaagtgtttccattttacagatgaaggcaacctcagagaggttaggtctttgtctagtgtcacacagttggcaagagcaacttaccctttgtaaatgccaccttgaacacctgtatttcatagcctccctcttcctacagattcccatggtaacagaagagtttgtgaaaccatcacaggtaagtggaagaagtcccaggtcttcactggccctgttccctaaagccatgggtctggcccacagatgcaggtaacaataatgtcctgggactctttttccttcatcttgggtccctggggccacctcaggcccaggatgattaatcagggtcaggagttatacagagatgttcccatttctgcatccaataggatgaagtgatgaaaggtttcctgggcataggcgccagcatgtccaaatgcttagagatgagaatgatatgggcatatatagggaactgcaagtctgtgcactgtggccaaaacttttgcagtttgagctgtgacagaactaacatgagtttctttttccttctttacaatctcacagatacatgatttgtccttttcgtagatcttagcaaactcagagtacaatattttttttcttgttaagaactctcaccttttcacttaaaggaagtacttcacaggttgtcttttacatatctgaatggctggtattatcgctcttgtgctttgggggtattaagtaaaataagcgttacttgaacacaagcactgtgataatgagacagttgatatgataaccaagatggccacatagtgattaacaggcaggtagtgtattcatcatggatctattggacaaacggatgattcacgtcttgggcagaacagcgtgggacagtgtaagattttatcacactactcagagaagcacgtcatttataatttttgggttgtttatttctggaattatccatgtaatattttcagaccacagttaaccagtagtaagtgaaaccatggaaaacaaaattgtggctaagatcggggacgactgtatatgtattcagtgctatacattttattctaagcaccgcttcgactgcatctcacaaattctaagttgtgttttcatttcatttagttcaaaatatttttaaatttatcttgagtatttcttctttgttccatgcgttgtcttgtttacatctcccaggtattttgggatttgccagctctctttccattactgctttctagttgaattccattgtgattgcagagcagaccttgtattatttctagtaaatttattaagatgtgttttataactgtgtattgtaaactggggagtaaatgcccttcgtggggtctctaggatcattccaacactgccgtggaaatgaaactctgagaagcataaaggatttattatattcataggtcctcatagagggtggcacagcaaaccatgcatggagccatatggaaatagctctcagggagtggactcaaccaagcaggcagggagccaagagggagagcaaggacctgtgggcaggtgcctttcctactgtgtttgaatgtcattcagtcacagtcaaaggatgaaaagaaggggaggttgtgacagggaccagtcttagcatgctggggacctggtcaccggggtgggttgctcataatgtattggggatgttgaagcatcaggaaaataggaagttttaaagatatataaaacaggcccagaatgtggtctgtcttgttgaatattccgtgtgagcttgagaacagcatgtattctgttcttgttggacaaagtaatctaaagatggtgattatgtccagttgattgatggtgttgttgaattcagttaagtttagtggttttctgcctactgtatctgtcagtaacagaaaagagtgtggaagacttcaattatgatggtggattgatctgtttctccttgaagatctgtcagtttttgcctcatatagtttgatgctctgtggtcaggcatgtatgtgctaaggattcttgtatctttttggaaactgcctcaacctcccgagtggctgggattacaggcgcccgccaccacgcccaactaatttttgtatttttagtagagacagggtttctgcacattggccaggctgatctcgaactcctgacctcaggtgatccacccgccttggcctcccaaagtgcctgtgatgttttcttgatagctacacatgatgagctcagtaaaaggaattgctgtaaataggcctttaataatgtggtggtgaggtgtgtcagcgggcaggggaagcattttaagtcccacagttaggtctcagtgttttagtgagcctgttcctcttgactgaaattcacatgtgtttctaaattgtgtttattatgctttttctctcccattatgtggaagaggaatactagagtgggttgtagttggttatttcccttcccccagatagattaggctctgataatacctctgcaggttaggctctgattaactgttgtctcccaagggcaggctttgtttagaggaacacattgctatggcatattttaaaatgattcattttcccctctctgctggaagcacaaggggatttttttttttccagtattcaccatgagaacttggttaagtttctggaggtaaatattgcaagattgtgggggccccctatcagagtgcctcctgaattttcagctcacagaattgtccacacagaccttccagcaatttatgcattatagattgggttttcctaacctagcactggtttgcatgatggtttcctttcatgagtttctgctcctgtgagccttgattctcctgtatgccctcgtttgtctctccaatcttgtgggcagcagtgtgtgctgtgcccttatctttcctgtgtggatcctagaattgtccatttttcagtctgtttaactctttacttgctattgtgatagagtggccacttccaagctccttacatgcagaatagaaaccaaagtccaggagttaggccttcacaatgtggagtctcatgttgggacttcttggtggtggtgttaggtgcacagcaagagacagacacgtggagttcagggaagggatccaagtgaaagctatccgtcagccagtggctggcctgtggaccatggcagatttaagaggaacactcttcaggtcatagtggcagtcccatcagtgaggaaggatgtagagagtattctctaatgactgggtctcttgcatggtcacctagatagaagtgggaaccatcactaagacagataaagaagagtagtaaccatgggtgtgtgggggtaggatgaaacgggtgtccagctgttggcacagtctttaaatggggaatgttaagagattcattcagaggcaaagcagtaatggaggtcaaataacaccaaggtcagggctggtgcttttcctcccttttgctggctcagacttttgttggtaactcttggtagggcctaagtagtttcagacggtgtgacagattaggttaaaagcaaatgagattgactgggagagtcattcagcctgtggtgggagcagctgggggccaagctttgactgagtataggtggagagaggaaagatatgactggtgtggggacagcacaggcaacactaaggaggaagtggactttggcagcctgagctcacacaaggtctgagtggctgaaattggaacaaagagccaggccacatggggacgtcttcataacagtcctgagactgcctctgacttgggtctaacaaagatgtgaggtggtgctggatccttgttgcatttagcaagcgctgcctggatcccttgagcagagtggcatgtggagaagccaggtgaagtacctgtgtcatggatgctgagggcagtggagttcaaggtgtagcagtcacgatctggagatgtgttcccatgaatggtgtgcaaccggggagggagtatggctgtactcaggatcctcgtactggcactttaaaccaagatggtaagcacaggtttcagtatctgggtctccagggaggtgaactagcaggagcatggatgagattccatgatgtaaggcccagagcccagtgggagacaccataaggacctggtatctcctctgagttggagaactagggaggagcgagatttactggggttcctggggattgagtctgctcatgatttcatctgcccccatcatgcagggccatgtgacctttgaggatattgctgtgtacttctcccaggaggagtggggcctccttgatgaagctcaaaggtgcctgtatcatgatgtgatgctggagaacttttcgcttatggcctcagtaggtaagatctcttaaaaccacaccatcaacctctgctggactctgctcttcccctttttccaggagtttcctgtctttcccagagttggacatgggcccttcttctttccttggttcttgacctgtggaagacataggcgttgtggttgccaggcctgggttttttctgccccaacatctactgtcctgaagccttttagttaagagtttgggttcagactcttgtaacttgcccaaccgacaccacttggttttgccactccttgctaaggtgactgttcagttctgtggtggacctgtgttacaggttctccccctgcctttagtagacgtgtctttggacctgcctttctcaggaattacaggtacttacatggttgctatttgtagggaaccctagactatgacagcaagaccccctcccaagggtttttttgtaataaatttccctcctgtagtctgtcatgggttggcgcaccctgggccagtgttgttgacccacctccctgtttttcccttaggatttcttctaccttccaggacccagatagtctcctgacttaagctggggacaggggagaggcctgtgttcctgaaagcgtagtgaagtcttcagccacagcaaggggggttaacagggtttgggacctgtgagtaggagcagtgggagggcatgatttgagggctgaactcaaatcataccaggcaaatgtcctatgttccccactattttggtgccagggctcatggccatacctcatttttctcttttctctgcctgcttgacaatttgcctacttgtcgtttctactgtgattgtcccctacctctgttctccacatctctcctgttcctgttctgcagtgttctccaacattagcctatacctaatgtatttaatattatgagctgtgcagatacagatgttcctcagctcgtgatggggttatatcctgataaacccattgtaagttgagaatatcgtaagtcagaaatgcatttaatacacccaacttattagacatcctagcttagcaacacagtagagtgtcagttgtttagcctggtgattgcatggcttactgagagctgcagcttgctaccactgcatcacaagagtatacacactgcgtatcactagcctgggaaaagttcaaaattcaaagtatggtttctactgaatgtgtcactttcgtatcatcataaagtggaaaaatcataagttcaaccattataaatcaaagactgtctacttaagctctcaaacatcagctatccagttgtaattgcattttcctggggtgacacacattctatgcaggtctcccctgtctccatcagatgacgtcctattgaaaaccattgacagagaagggagttgtatgccccctgcctctcttcccaccatagtaccccattccttgttctcttgctggttatgggtcttcccctacatggtaaccttaagaggcctaatactgcaagtattatcttccttgacctgactccagctcccttgtcctgaaaacaaacccatggcctgggtgcaatggctcgtgcctataatcctagcacttggggaagctgaggtgggaggatcacttgagctaaggaatttgagaccagcctcgacaacataatgagacctgtatctccacaagaaattctaaaaaaaaattagccaggtatggtggtatatgcctgtagtcctagctacttgggaggctgagatgggagtgtcactggagcttggaaggtcaaggctgcagtgagatatgactgcaactgcactcccatctgggtgacagagcaagaccctatctcaaagaaaaaccatggactcgtccctccctgtgttccacaggtatttgtaatggagctgttcccttctaccaaagtctgcatatacttcacttgcatttttatgcttttaggttgtttgcatggaatagaggctgaggaggccccttctgagcagactctttctgcgcaaggagtgtcacaggccaggactccaaagctaggtccttccatcccaaatgctcattcttgtgagatgtgtatcctggtcatgaaagacattttgtacctcagtgagcatcaggggacacttccctggcagaaaccttatacgtctgtggccagtgggaaatggttttcatttggttctaacctgcaacagcaccagaaccaggacagtggagagaaacacatcagaaaggaggagagcagtgccttgcttctgaatagctgcaaaattcctctgtcagacaatcttttcccatgcaaagatgttgagaaggattttccaaccatcctgggccttctccaacaccagaccacccacagcagacaagagtatgcacatagaagcagggagacctttcaacaaagacgttacaaatgtgagcaagttttcaatgagaaagttcatgttactgagcatcagagagtccacactggagaaaaagcttataagcgtagggaatatgggaaatccttgaactctaaatacttatttgttgaacaccagagaacccataatgcagaaaagccttatgtgtgcaatatatgtgggaaatcattcctccataaacaaacactcgttgggcaccagcagagaattcacactagagaaaggtcttatgtgtgcatcgaatgtgggaaatccttgagctccaaatactcacttgtggaacaccagagaacccataatggagaaaagccttatgtgtgcaatgtatgtgggaaatcattccgccacaaacaaacatttgttggccatcagcagagaatccacactggagagaggccttatgtgtgtatggaatgtgggaaatcttttattcattcctatgaccgcattcgacaccagagagttcacactggagaaggggcttatcagtgcagtgaatgtgggaaatccttcatatacaaacagtcacttcttgatcaccatagaatccacacgggagaaaggccttatgagtgcaaagaatgtgggaaggccttcattcacaaaaaaagacttcttgagcaccagagaattcatactggagaaaagccttatgtgtgcatcatatgtgggaaatcatttatccgctcgtctgactacatgcgacaccagagaattcacactggagaaagggcttatgaatgcagtgactgtgggaaagccttcatctccaaacaaacacttcttaagcatcacaaaatccacactagagaaaggccttatgaatgcagtgaatgtggaaaaggcttctaccttgaggttaaacttcttcagcaccaaagaatccatactagagaacaactttgtgagtgcaatgaatgtggaaaagtcttcagccaccaaaaaagacttcttgagcaccagaaagttcacactggcgaaaagccctgtgagtgcagtgaatgtgggaaatgctttagacaccgcaccagcctcattcaacaccagaaagttcacagtggagagaggccttataactgcactgcatgtgagaaggcctttatctataaaaacaaacttgttgagcatcagcgaatccacaccggagaaaagccgtatgaatgtggtaaatgtgggaaagccttcaacaaaagatattcccttgtcaggcaccagaaggtacatataacagaagagccctagcaattgttgggatgtgtaattgtcttattcactgtaggacaccagagagctgatttttcaagggatccaacagacagaaattcaccctcatacatctgcatatcactagttgaaagattcactacaaggtccaagtacttgggaagctttctagagattacttgtactttctaatctgcccagtgttacaacagacactaccatgtggcatatcctcaccgttttcatcagtcactcacatgtgctcaaggaatgcagaccactgtgcttaccaaattctgaagggaataatataataaaagcctgttgagggtcctcttccatcttgctgaactgttcgaggcaaagacaaaacccaactttgaccaagaagagcaatctggattcttgtagcccatggaggtttaccttcttcataggttttttttttttttatgtgattgccatagtgggatattccctctcccacattacccaagagggaaatgggctgtcttaccatgtgctgatgtatgtgctctgccagtgtgaagggtgaacagctccaactttatgtccccccagggacatagtatgagatcggaaaatagttcttagtcctgtttgtcttaatttttattggtttccaaggtctcctaggaaggagagcagagctgtgtggtcctaatcatggtgtcgatgccagatttatttgtaggtccagaggtctccctgagaagaggcatttgtgacaaactcaagtgctgggacctgcatgaattgtttatttgcagtgatgcttcatatttcccagcactgttcatggtatcttatttcccaggtccttcattgtagccatgggcactgaaggactgaattggtaggtaggtcactggttgtaagacctactggggccaggtaagaacagtaattggcccagacaggtaggtgtgataaacagagtagaaaagattgtggccaagaagagtgaatgtgtcccatccaaaggtgcatccagatatgtctgtgttactatggcttcatggtttgggggtatatagaaattctcaggacctcagacctttgattctcctttagcaacacacatcgtcagcataaggcatctaaagattttgtggactcataacttatgtactgtttttgagatgattgctgcacgggcaggaaagcaggatttgagagaacatacaccttgccttccagatatgtggtttttgtgattcacccagatctgttgtgccagttaggaattatctttattacttcccgtttattgccactgctgagaaggctgtccttcctaacttgtgaggagatgaatccttaataataagtaaatcttgtgttatcctatagtctggttttccaaaaggagaggtagatgcatatttttgtgtggaaccatttatcttaaaacattgaggtgcagttttcatacacaaaaccttctatctttttaagaactgtctgtatggtttattgcccagttaatgggttttgatagtcatgttatctcagtaagtgtcttgtcttagaaatatgtgtgtataggctgggtgcggtggctcatgcctgtaatcccagcactttgggaggccaaggcaggtggatcacctgaggtcaggagtttgagaccagcctgaccaacatggtgaaatccagtctctacttaaaatacaaaaattagccaggcgtggtggcgtgcatttgtaatcccagctacacaggaggctgaggcaggagaattgcttgaacctggggggcggaggttgcaatgagccaaggtcgcgccattgcactccagcctgggcgacagagtgacacttctcaaaaaacaaaaacaaaaacaaaaagaacagataagaaatacgtgtgtatatattctattttgtgtgttttcattcaccttatttcattcagtcttccaaatgaaatgttcttaattttgatgaagtctaatttgtctgtttgttcatttactgttattttggtgctattaaaaaaattttattccttggctgggcacggtggctcacgcccataatcccagcactttgggaagccaaggtgggccggatcacctgaggtcaggagtttgagaccagcctggccaacatggcaaaaccccattctactaaaaatacaaaaattagctgggcatggtggtgggcgcctgtagtcctagctagctacttgggaggcctaggtgggaggactgcttgaacccaggaggcggaggctgcagtgagccaagattgcgccactacactccagcctgggcgacagagcaggactcccatctcgaaaaaaaaaaattgtgtaattataggaactttggaaagattgttattcaactgatattacataaggtatttattttgtaaattatttgcaatattagaatttctgtcagcctacagtatttctctgctgttattctgaccttaacacattgaaagagttcttaattttgcttcgccatcccttacgcatacttaatttttgttattttgccaaattccaattatctttacaagatcattttattttttaaaagagctaaccagacaagaaaatttgcccttgttattcccacttcctatatagcttgtctgccaaaacctttatgccattattctcatcagtctcattctcaggggtttctctgagcaaatccatataaaagtggaactatatgacatttcctgccccgttctcatgcttcatctttaataggtaaatttaccattttaaatagttttaaaattatcttcactgtgtgtactttggatttaatccttactaatgattaagatgctctaagaatcaatgtaaaactaattttaaagccagcagcataattttgtgagttatgcctgagtattcaaaaatcctaacaagtcaaaaatattaattaaaatcaatatgtttaatctttccaattaaatacttccattccataaacttcagaaccaaagttagataccaacaagagactgaagataaatacagtgtcaatagtatcaagggactagcccatataatatacttgaaaatcgtattaatcaccaataaagtaccccaccataaacaaaatacacaataaaaagtcaagatacaaataaagacaggccaacatatgagtagaccattgacagaagaggaaaaacaaaaggcaatgaaaggatatgaactaatgttcaaatgtatttcaatatgagaaataccagatatattctatatcactttaaacttctaaagtaaaaactggaaagctgggtaattctaaatattgtctgggacacagtgatacagaaacacttttgtccatcttatgggagaggaagggcaatgtataacataattccagttacatactagatcaccatatgacctagccattcagctgcaaggtacatttctcatgtatggccataagtttatttagaacataatactgatgaccttatttttaaggttgaatcaagctggtggtgatatatttcatagcaggaaaatggaggaaatacatgtccataatcagaggatttgaatcaaggatgaaagcttcatgatgtaaaatattacatggcagttaaaaacaattggctagaggtaagcccatgaaatataggatagaaatataatattttgctgtagtttgagtgaaaaagaaaaaaaaagaattgtgaggtctacaataaaacataatttaaaaataatttaataccacaaaaactccaaagaaaaaaaaccaaaacaacccagacacttcttactagaacatatgttccatgcttctatctcggcttctggtagccccgtgtgttccttggcttgaagatgttcttcctgtgtcttcacatcgtcttccctctgtacatctgcctctgtgaccaaatttcccatttttctaaggacacagtcatagtcaattaggaactaacctaatggattaactaacatgattacctgaggttctgagggtaacgactccaacatcttttttggagacacaaacacttaacattgccctatgaatttctgcagttcttcaaagggcagagtgaataataaccacagcaatttcaagacacacaggcttccattgtgagatggcttgtttaaagaaactattaattccctacactcttctgatcactctgttgttcacattcattttaggatttctcttccaaatcacttctggtgctttccttcttgcttctttcatttccttcggtgttgtagttctattatgtttttattccgtcagcaatttcttaaatttctcttttcaaccttaagcagtttttctgaaattataaaatttactgtgaacatttcaaacatttccacatgtgcatgaagttaaagtgaactctgacattcccctctaccccatcccttccctccctctacacccaaggagcaaataccatttaactgggtgaggatccttccagacacattttttgtctgcttacaaatattaagatttctaattcgtctttgcatgaccgacttgccgagttaatttaccgtccacatttcctctgtgacatttactgattgaagtgcaccaactgtgaatggtcataactagtcccacccccacaatcatttctcacagattaagcagcataagagcatagtgctttttatctaatttgttcattaaatgtaacaaagttacaaaaacatgaacatgaaaacgttttacctctgccgggcacggtggctcacgcctgtaatcgcagcactttgggaggcagaggcgggtggactacatgaggtcaagagttcaagaccagcctggccaacatggtgaaaccccgtctctactaaaaatacaaaaaaactagccgggcatggtggtgggcgcctgtaatcccagctactcgggaggctgaggcaggagaatcccttgaactcgggaggcagaagttgcagtgagctgagatggcgccactgcactccagcctgggcaacaagagtgaaactctgtctcaaaaacaaaacaaaaaacatgttttacctcaatcataaactgtggaaaacatacagaagttcacaacttttactgtaagttcaaaacttctactgacttaaaaacgggtgctaaacaagtttaagtcaatatattgcacctgttctcatgtgtttttcctatattagacagtaagttccttccctgctcaagggcaggacccatagcccagccatccactgcatcccactcttctaagtatgaccacaacagtgagtggccatggagctaaatgacaggtgtctcatgagattcttgcctatcacagcagcaagttcatagtagatccttgtaccaaacacttcagtgaagactgtatggaaagagctggaagctaagaaaaacctagggtgtcctttatcccatggaaaacactcctgctttgggacaaactggggcctaggtcctcaggcctggaaagaaccctttgatgacagccaatatgtttctagaggggtttctccaactctcttgaacccagggccttaggtacaagtacagccacagctacaatacatgcagccttccagagagaggatgcaggagggtgggggtcctcaagagtcaactctccttcccacaggagaggaaactgtgcactctgtcctgaaaaaacaaaaacagagaactcttaactcaccaagaattctatttataatatgtgcaaaaggaccacagtaaaaggtacatgcccactatgaaaacatgaatatatatgcagtgctttaaaaggttgtgaggaaagctcaaagtgagaaaatgataattttctatttttcacacgttttaacctaacattatctcatgtagcttgaaaactaaaagaaaatctcacaaaaggaatttcaaattaccagattcaggctaagtacagtggctcacacctgtaatcccagctttttggcaggctgaggtgggtggatcacctgaggtcaggagttcgagaccagcctgggcaacatggcaaaaccctgtctctactaaaaatacaaaaattagctgggcatggtagtacatgcctgtaatcccagcttcttgggaggctgaggcaggagaatcgcttgaacccgggaggcagaggttgcaatgagccaagatcgcactcctgcactccagcctaggcagcggagtgagactccatctcaaaacacaacaaaactaattaccatattcagtgctagcaccaagggactaaggtcatggtggttaactatgaaactcacgtaaacctgcccacgtatatcctgattcacctgttaaaatgctaggcactttattttgtagcaaaacttcacgcaaatgtttataagatcagacaatgagattcctctccatgttgttttcttgggtttactgggtttaccatggattcatcttagttgtgtgttttattttgcctgttttagctataattcaatccctagaaaaatgctgagggggacctaaaaatacccctctacacaggattaaagaatctgataaacaccagaaagaattaggactcatctgagaaggccaagcaagtacaaagtgatcactatgttgccagagaaaataaagacaacaaacagacagaatggaatcaggaaaatgtgagagtgctgagcatttgaaaccatattaggctaggtgtggtggctcacacctgtaatcccaacactttaggaggctaagcaggatgatgacttgagtctagcagtttgagacaaatctggggaacacagcaagacctcatctatacaaaaaaatttaaggctgggtgcagtgactcacacctgtaatcccagaactttgggaggccaaggcaggtggaccacttgaagccaggagttccagaccagcccagccaacatggtaaaaccttgtctctactaaaattacaaacattagccaggcgtagtggtgtatgcctgtatcccaagctactcagaaacttgaggcaagaggaccatttgagcccaggagttcgaggttacagggaactatgatcatgccactgcactctagcctgggtgacagagcaagtccctgtctcttaaaaaataatgagtttattaataaaaatcaaagccttaaacagtcttaggtattgcacattttaatgtggtgcacattttaatgtggccatctgtacatgggttcttctcaccctagatataaaaaagaagtgtcacatgaagatgttctcagtattctaatttctactaaattcaagaatctcatgacacaagccttcatatttctcacaaagaattactctcctcatggatatcctcccagagatgtctggatcaaaggcaacttccaagaaatgcctgaagagctgccctcactgtctaactctgacaaaggatggcagtgaatgtatgttaaaaaaaaaaaaaaggaataaaacccctttacctctcaaacattcccctaccaaaaaataaaactgatcttacagggaagtctgtaaggacataaagcaagaagatacctgtaactgaaggttttcataagttcatagagaaaatcccaaggtgggtcaaattccagcatggctctttataggacaagcaagtgacaacctggtcacaaagttttctcacatcaataacaattatgtagtaacttttcattatgattctcagatagtaagatttctgctctggccaaagactgtccttaatagttatatttggaatgtctttctccagcatgagttctctgatgttgatggaatgccttccacatttccccctggtatgaatccttctgcaatgagtgagaactgagtggtgactgaagggatccttacattcactgtattcacagggcttctctccaaagtgactgctcatgtgttagttaagaaagagctgacaaaaaaaatgaaaagtttcctgacattctttgcattcgaaggacttcttcctacagtgtgggtcccattatgaatgataaaataacagtgggtaaaggccttgctgtattcattgcagcaatagggttctctcatgtatggaccctttggtgctgcagaaggtgtgacctgcgtttgaaggccttcccacactcgatacacttgtagggcatctccccagtgtggatgacagagtgctgaatgaggtacgtgctccggtgaaaggctttcccacactgggtgcattcatagggcttctccccagtgtgaatccgctggtgctgtatgagttctgagctgcatctgaaggcctttccacatgccatgcaatcatagggcttctctccagtgtggatgatgtaatgttgaattaggtgggctctattgctaaaggctttctcacattctttgcactcaaagggcttttctccagtgtgggtcctattatggcgaataaaagtagaccggtgggtgaaggcctttcgacattgactacactcatagggtttctctccagtgtggattggatggtgctgcatgaggtacgacctgcgtttgaaggccttcccacactcaaggcacttgtatggtttctccccggtgtggatgaggtagtgccgaatgagagttgagctctggctaaaggctttcccacatgcattgcattcatagggtttcattccagtgtgaaccctctgatgtcgaacgagataccacttcctgttaaaacctttcccacactgcttgcatttgtaggggtttgtccctgcatgaatcaaggcgtctttccctggttgctgtgagtcacattcatggagaacatctgctgataaccactcttgtaatgccctggagtgcagaccatcatctgtccccaaaccttcaccttcaaggctcactttcccaagatgggtctccttgtggaggtctgtctccggtgtcactttacctttctgcatttccaaaagcccttcctcatccctagctctccccaacctcgaatcacttgaggttgaagattccagagtcaggcttccccggagaaaggcccgctcagataagactggcgggtaagtggttggctctctggtatgaacttgtgctctgtcacctgaagggcatcaacaaacaaaggaggggtcttttagtgataaaatatagaaaaacacaaaataaccacttcagtaggaaaatgaagatgaaaatagtgcctatgatacttgctgcatttttacatctctaacccaggttaccaaatactgcttacggtccttgtatccttgacaccattaaagggaaaatctggagggcaggctggaccgggggacagaggatccggagtaaagacatttctctttacagttcagagtaaggaagagataatagagttttgatgacattgtctgaagggcatttgctttaagaattgaacgcttacatccatctgacaagggattaataaccagaatatataaggagcttaaaccactctataggaaaaaatctaagaatctgatttaaaaatgggcaaaagatctgaatagacacttctcaaaagaatacatacaaatggccaacaggtatatgaaaaactgctcaatataattgaccatcaaagaaatgcaaatcaaaactacaataaggtatcatctcatcctagtcaaaatggcttttgtccaaaagacaggcaataacaaatggtggcaaggatgtggaaaaaagggaaccctcatacactgttggtgggaatttcaattagtacaactgccatggagaacaatctggaggttcctcaaaaaactaaaaatagagccaccatatgatccagcaatcccagtggaggtatatacccaaaagaaaaaaaacatcagtacatcaaagagatatctgcactaccatgtttactgcagtactaggcacaatagccaagatttggaaacaatttaagggtccatcaacaatgaatggacaaagaaaatgtggtgtgtatacacaatggggtactatttggccataaaaaaggagatcctatcatttgcaacaacagggatggaactaaaaatcaaaacaactgaactcatggagagagagtagtaagatggttactggaaactgggaacggcagtaggatggagtaggatcctactccatggagtagtgaggatggttaatgggtaccaaaatgaagttagaaaagaatgaataagacctagtatttgatagcacaaccgggtggctatagtcaaaaataatttattctatactttgaaataactaagggtataacgggattgtttgtaacacaaagaaaggataaatgcttgaggtgacagatacttcctttaccttgatgtgattattatgcattgtatgcctatattaaaatatcttatgtacccacataaattaaaaattagccaggcgtggtggtgcatgcctgtaatcccagctactcgggaggctgaggcaggagaatcgcttgaacccgggaggcagaggttgcagtgagccgagattgcaccattgcactctagcctgggcaacaagagcaaaactctgtctcaaagaagaaaaagaaaaataaaaataaatgaagccttttggtgctataagagtttagggaagttgcacctaatgagactggaaagaaaaagagatcatggaaggctttctagaggaggtgtcccataagctgagtcctaaaagagaagccagagtcattgccagagagaggaagtgggcaatgggttgaaggtgaggaagtaaaaatgggtagattcaccctttgggcaccagatgcctggtgaaaccaatataaaagggtgattagagttggagcaagaaaatgaagattccagcacaaaagggatggaagtacacacaggaacaaatggtacaaaaggcctagtgtagtaagatctgacaagtttctgctgtgtcaggaggcacaatgcatggcagacaagagggtactggagacagaatgactcagttcaaatcctgcctgtgtcaagtgggttgatactggaggatgactttctccaccaggtctccaattcctcaactaagagactaggagactcaatttctcaggctgtcatgaggttaaatgagaaaatgcacagttcttgatgcagcgcaagtgttcattaaattgtgggacattacccttattattttcattgctgcgctgggcaatttgggtaatgccagtgacactagcaagaacaacttcagtgctgtgatctgaggaagctagcagctgtgcttcatgaagtggccagcatcgcatgcttagaagacccgagtgcagcagcagtctcatacctggaatggtggggatgggaaatggtgcggctactctggaaaaatatttgggggtttgacttaaaactgagcacagatctgtctcttgactccaccagtcatctcctgggtgtatatgcaacagaaatgagtgtttatatccactaaatattatggaaaatagtattcatagcagcattcttcataatctccaaacaaggtaaacaatacaaatgtcaaccaataggagagtgaagaaacagatcctgatgttttcacataattttatggtacacagcatataggataaacccagctcatggacacaatgatggtgaaaagaagaaatacacaaaagagaaactgctttggggctccaattatgcccattcacaaccaattaaaaactagtccctagggagagagtctaaacagtggctcccactgcaggaggagctattgacaaagacagggtaacagaaactgccgaggtgctggaaatattgtaaatcttgacctagatgaagaattcaatttgcagaaatgcaaaaatttaagctgagcccttcaaatttgtacttattattgtatacataagattttttttagtttgagaaattttaaacaaaaaaatattaaagtcaagtgtaaacatctcttccaaacatgagacaactccaagaagcttggctttacaagtggggtcaacacaagttacagggtattgtaggtgaaaaagcattttgtctgttttcgccaagtgtaagcaatttgagtacacttttttttgtttgtttaaacttatattcactttctggttttgtattgtgcacactttttatttgaatatagataagttgaaggtacagacaaagcagagattttttttaaaaaaagcaagttccctgagaacacagcaggtatgatgcaggcactggcaaagacactgaccatgactagaggtaagatctcctccatagaggacaagagaagccaagtatgagaccgtgcagatgaatctttaagaacattaaatacacatcctatttttaacatgaaattaattatatactgaaacatcagctgctggggaagtggtgaaaatctgaaacacatctgagtggctgcaggagccggtgcagggacaagagctgcccagaggaatggggcagatgtggggagacctgtcaggagcctctggtatggcccaggcagaagattatgagagcccggactagggtgttggtgaaggagccaagggaagcagtggaagtgatggacttaggagatatggatcatttaaaatgagcaggactagggatgaatggatgctgggtttgatgaaggtaggtggagtccaggagctatgtggtgtgtttccagccttctaacctgcttggatggtaagacattctctgaactgagtgtctttttaggcatcaggagctaaaggtgcctctgagacacttaagtggagatgtgggattgagggaatgggaagggaggtatttggaacacagggttgcagatggggctggccaagaagcccaaggggagagcccatgactcagtggtgatacaaatccacaaggcaaatggctccagctacactcatcagcacagatgtagggcagagaaggccaaatgtcaccttggtgtttctcagggcaagaggggcaggaagatatggagcaaagggctgcttccgagtctctgatggtctaactggaggatggatgagtggacggagagggtggaaaagagtgggattcacagcataatgcagacagtaatatcaaggggaggaaagtcccctttctcttgagtccagaaagaaatgtatgacattacatttatgatgattaaaactgttcatgcataatactaactagctgacatttgttgatcctatggaccaggaactgaactaagcagtgtcatgtgttatctctacatcctctaacaactcaatgacacagaaattatatcactctgattttgttgagtagaggagtctgaggtgatgtaaaccaaacccattaattcttttccatgggcacatagccaaatcacatttgtcagtcctgagcatctaggtgtggccaaatgcctagttcttgtcaagactatgtggttgtcaagtatgtgtacaactgggtatgacttctccccttcttcttgttccccttctaccagctggattgagccagagcaaccataaagattcctgttcacagcaaaaggtacctgtgtctctgaataattgtgtggctcagtgctcacctgatgatggacactatgacccaaagtgagtcagaaacaaccaggcccccggaaagccacaatgagcagtttcacacagaaattcagaggcagtggtgccctcacattatctgaagactgccatgactccacatgaccagctggtggctgcttacctgcacaggtagcatgtgagaggcctctcttcactatccacagctcctgcccatgctctagcaggtggaccaactctggtttgggaacccgatgccctgttgatagcaaaagaaatagaataggggtaatttaatgagaaaatgaaagtctctccatcttgcctaggacttcatgacagggtccagacatgaatgcagctgctcccaaagtaagcaaaatgctgatgtgagccctgaaaatcaagggcattgctctgagtgagctgtgttccccataaaaatcatatgttgatgccctaacacccaacgtgactgtatatggagacaggatctttagaaggtaattaaaattaaatgaggccacaagggtggagccttaatctgataaaattatggcctcataaaaacagagagagatctctcctctgtccctccaccttgtaagaacacagcaagtcagccatctgcaagccaggaagagaggtctcaataggaatcaaatttgccgacaccttgatcttggacttctcagcctccagaagcataagaaaataaactctcgttgtttaaaccacccaatccatgacattttattatggcagccaaggagataaaagacaggcacaaatcccactgttgggctacaactgccatggagggtagtgctatctgtctacacaacacccactgcccatgacctccgtctatggaagccaacgttgttcaggcacacaacactttgacagccatgggacacggcaaaggtgtgctgcttcctccagaaggcattttctttctttctttctttctttttttgaaacagagtctcactctgttgcccaggctggagtgcagtgctcggctcactgcaacctctgcctcccaggttcaagggattctcgtgcctcagccacccgagtagcagggattacaggcatgcaaaaccatgcctggctagtttttgtatttttaatagagactgggattcacaatattggtcaggctggtctcgagtgcctggcctcaagtgatcctcctgcctcagtctcccaaggtgctactgcacccggccccaggaggcattttctaacaaatctaaatcattgcttctcaaacacctcgtgctttcagaaccacttggggatgcgtgattccaacctcaaaccaaatgaaacaaaatttcttcgtgtgagacctgggcatcagtacttccaaaatgtgccccccaaaattctggtgcccagatggggctgcaaaccactggctgaggctggacatggtggctcatgctgtaatcccagcactataggaggccgaggcaggaggatcacttgaggccaggagttctaaaccagcctggccaacatggtgaaaccccgtctctaccaaaaatataaaaaattagccaggtatggtggtgtgcacctatggtcctagctactcaaggggatgaggttgggaggattgcttgagcctaggaagcagaggctgcagtgagctgagatcatggcactgcacttcagcctgaatgacagagcaagactccatctcaaaaaaaaaggaaaagaaaaaccagtggttgaaataaattggtaatgcaagagtcttcattaggcaggtgaccaaagctggattctcattgtgaaaagaaagcatttattccaaggtgggaggatggattgaacatgggggcctgctgccccagtcaaggctgcagcacccagcatccctatgaggagccagcctgaggacaatcagaagcctgaaccaagaagaaggaacagagaaccaagacatccttgatggcgtcactgggctgcggcaccgaacaagcctggagccaaccacacctcaggcttctcatcaggcgagttagtgaatttccttccaggtgaagccagtttgatctggttttctgttatatgcagccaaatgctttccactagatgtggtgagtaaaagacaggaggattctgtatagaagaccaatgactgaggtacaaggatccacagaaacatcgactggcagattctgaaccatagcccaggattccttcagacatgtcacagtaaggtccaccaatgtgtgctacatgcctggctttgagttctgggacagggctgtgggaaaggtgaatcagatgatcctttggctctcccaagagctgagctccctgtcacttttcacacgctggttcctccacctggaacactgttaccctcttccacctccttctatccagctaactcctactcagctttcaggtctcagctccactgtcacttcctgagatgccctctttggaactcccacaataggttatgacatcctgcttatttattcctaaattcccctcatttttctttctagaacttatttcagttgtcatctatggattgatgtccaccttcccaactgaactcagagtgtgccatcaattctaataacttctttatcctgacccacttttgttaaatattgtattctaaaagggaaccttgttttgctctggtaagtgagaaagtcaatttcccttcctacaaatagaagtctgcaatcacaacacaacaaaatcaaaacaatgccactaagtcccaggaaacccttgtatgtttcttagggctaagttggaggttgtcccctctgttaaaaaaaagaaatgaactgcactgggggagtgaaaggaaaatgaaagactcagcgctgatctgagacttttctttttttttgagccggagtcttgctcagtcacccaggctagaatgcactggcgcaatgttggctcactgcaacctccgcctcccaggttcaagcgattctcctgcttcaaactcctgagtagctgggattacaggcgcgcaccactgcgcccagctaatttttgtatttttagtacagacggggtttcaccatcttggccaggttggtattgaactcctgacctcgtgatccacccgcctcggcctcccaaagtgctgggattacaggcgtgagccaccacacccagctgatgagacttttatgacaagaattagcgtgctggacagagaaagtaaaaggaatggctttatcagggtatcaaaccatgccatttgaggacattcctgtgtaccctctaaaaacacctcctggatcaacagagcatggatatcaagcatcagaaaacaactaatgaccatgcaggcacccagatgcctttttacagagattgtattgcttaggaagatatccgaggggcactgaggacaaatgtcttctggggggctgcctgactcacccctttctctaagaacagcccatcacccatggcccctgcttaatagggctgtggccacagctgaccccaccaggatggccaatcagcttccttcttatgcaatcttgattaaggacctcagaatgggctgagcactggagtgagggtttgtgttaaaaggacattttctaccccgacaatctctgatgcagacaaagggagaccagtcaggaagaggtgggaacagaaaggtctgtcaagagaaaggtgggcagttccagtgacctttttgcctggccaagaatcagggttagggtcctcctcagggatgagaggtgagtcattacctagtgaaaccagaagcccacaggtctccagcatcacctctcggtacagggtcctctgggccaggtccagctgtctccactcctcccgggtaaaggtcacagccacatccttgaaggtcaccaacatctggaaagtcaaacagaagtaatgctattggccttgtgttgtcgcataggatcagaacctgtcactcagtctctagtcaatgtgcagagagatccaggtctgaatcaactaggtctcctttgggctgacttccgtgcagggctcaaaggggaggcagatactgccttttgacaatgcaattgtgcctgagagaaaagccttctatggggaagctgttgaagatgacacaaacaatggcaatcccacgaggactatgggaagcagagagtaagtactctggcatattaaaagaatggaggaaaatgactgatactaatccaaccacaataacagcaacagcagcagctaagtgtgggggaaagaaaaatagatcagaccgttactgtgtctatgtagaaaaaggaagacataagaaactccattttgatctgtactaagaaaaattcttctgccttgagatgctgttaatctgtaaccctagccccaaccctgtgctcacagaaacatgtgctgtattgactcaaggtttaatggagttagggctgtgcaggatgtgccttggtaaacatgtgtttgcaggcagtatgcttggtaaaagtcatcgccattctcccgtctcgggtacccagggacacaatgcactgcggaaggccacagggacctctgcccgagaaagcctgggtattgtccaaggtttccccccactgagacagcctgagatgtggcctcgtgggaagggaaagaccttaccttccctcagcccgacacccataaagggtctgtgctgacgaggattcatgaaagaggaaggcctctttgcagttgagataagaggaaggcatctgtctcctgcttgtccctgggaatggaatgtcttggtgtaaaacccgagcgtacattctatttactgagataggagaaagccgccttatggctggaggtaagacatgctggcggcaatactgctctttactgcactgagatgtttgggtaaagtcaaacataaatctggcctacgtgcacatcgaggcacagcacctttccttaaacttatttatgacacagagtcctttgctcacatgttttcctgctgaccctctccccactcattaccctatagtcctgccacatccccctcatggagatggtagagatagtgatcaataaatactgagagaactcagagactggtgctggtgtgggtcctccatatgctgagtgccagtcccctgggcccacttttcttcctctatactttgtctctgtgtcttatttcttttctcagtctctcatctccaccttgcaagaaatacccacaggtgtagaggggcaggcacccttcactaagtcctctggtcctcactgtgtccctgccaggctaaggcttccttagccgtggtaaagcaaataaaggcctgacttaaatcaggcctcctgaatctgacacttgccagctatgtgactatgacgatgtcacatgatctctctaaggctcgatttccgaatcaacacaataactattcccatctcagcaggcagctctaagaactaaacagaaaatgttcacttaggcaatcagtggagtgcctagcacatgtaagtgcctgatgtgtttgggaactttattaatcccctgacaggcccagaggtaaatgtcgttatcacttccatttcacagtcagcaaaggctcagggagctttagaaatcaggcacagcctcacatttaaaaagcaaaagcagcatttgagcaccgctaaaacacctcaccaagctgccagagagcaggcaggtgggagtgaggggtgcttttagctacagccagcactgccaggatgggtgtggaactgcagccccgcagagacctgagaacaatgtctcagacaaagggaagtgcaagggcaaaggctgaaaatgggaaagagcttggcaagctcaggattccctggatgaatgcagtgagaaaggggacaatggaagaggagaaagaagatgcggtcaaaagggcaaaccaagtacagccttgcagaccatgctggtaggagggggtggatttattggaaatgtgatgagagtccctataagagaggcctattcaatcatcaaccatttattaagtacaataaatgtacttaagcctggctgttctgggtcttgggagagggaagcaacaggcactcacattccagggttggaaaaagatcctaaacaggcaactaaataaatgagtaaggcaatgtcagatggccttaaagattcagatgacaagaaaacagagcaaggagaccaaagagactctggtcagctttaaacggtgcaacagacgagacctctttaagcagcggacaccagagggagtcagaaataaagcaaaggagggagaggtggatgagaaattaacaactacgacaggagctgacagtaatctgggctatcatgaaagtaatcagagtgactgctagagagtaaccctgggcctcatgtgttatctccaaagggacactacatcctgcataccatcgccactgaacattttaatggactcgtttttcacctgtaactaaatgtcttaaacaggaaaatatactgttagttgcaacccagcgtcccttgccctaaactgaaagacaaattcctcagcctgccctaccaccttttctgccctggcatagcagcaaccgcagaaacgctcctcccacctctttcagccgctgcccttcgtgttgtagagacaggaggccaaggaggccagagggtcagactcctgctggggttgagtctccaaacctagcacaggcccagggagcagctccggaaacaacatcctgagcgacgtccccggaccgtgctgtgcactgagacggacacacacacatcacccagggagccgttcaagcttcctcaaccccgggggggggaagagtaaatatttctactttgcgcgcgcaaaaatgaaggacgaggacagtaacgggacttgttcaaggtcgcaggcccgagaaaggacatggttggaagagccacgaggaggactgcggtcgctcctctcacctgtgaggggttccgggaccctaaaagccctatttcataccacaacgccgcgcaccccagaaacggggacgctccccacgccaccgcgggcctgcattccggacccgggaccgcgcgacccccttctaggcctctaagaagcaacggcagggactgcactgaggacgaccctgaaacgccgtccttccgctcgtcgggcccgggacactgaggccgggtggccgcggggagccgagccagtctgctcacctgcgctgcgtccttcgtctccgccatccgaccgttggcaggacgaggccgcgtggggcagctcccacgggctcaaaaccctaccccgggtcctacaacggtgcggaggtgagccccagtcgccctaccatccttcccagcacagttctgagagcgcggaccaacacgccccaccacaaacgtccacgccagcgaggccggaagtcccgcccctgtgtcgcggtcgcctgccacgccttttcctgcgccggcccactgccttctaggtaatgtagtcttgtcccgtaagaggccaggcttggctctttttccttttttattatgcacaccatgtttctgtatatctcagatgatcttagcggagcaagtgtacacactggattgtaaatttttaaaacttcctattattcggatgcctcaacgtccctacaagcaggctgtgagcactcgcccaggcacccaggtaaacgagtttgataaagggggccctgccacgaggttccccgcttgcctcctctgagtgacccagtgacattcccatgtaccagtaaaatcttacgcctggttactgcgtcctcctccaccctgacgccaggcactgtccctgggactggcgtggatctggacccccgcttcccgcgtggagccattcccgggacatgctcgtggggttccgtctgtgggacgtctgcctcctctgtgtggactggtgttgcccagggctcaggaaggtctccaggggccgtgagtccccgcccgcttccggagtccagcttcgtgacaccatcgtgagaaagaatgcagggatgagtcaaaatgaagccaaaggcaagaagcttttattgggaagaaaaagtacacatttttgagaagagtgtacttttcccaagagaagagggaaatgcggacgtacgagggagagcgggtcatgcacaatggagtttgggtttctaattttatgggctcttctaattagggggtgggataatcatgaggtttttctaggaaaaggtgggaatttcttagaattggggtgccaaccatttttatactaaatgtgggcgtgcttggattggcctggcactggtgggtgtgtgatttaatgtggcaatgagtgtataattaggtctggggtaggaaatgggtcaaatctagcgtcatgggacagcctagccccaatcctgtttgttaaggtctcatcagcccagtcttcttgttggagtagctaattttaacagcttgatgttttcccccttctcctgtgaccacacagcattcctattttgtgggtgtttctttaattagagagtggaataattattaggtattctggaaaaggagggaaattcagggacccacctggttactgccccctttctctcttatttggctttgcccagaagagtcatggacatgtcatcctgactgggattttggccattctttctcttattttgggttttctgttatcctatggtttctttgcctagttcttgtttttatttgttgttcgaatttttccatcctcctgcaaccacccagtgctattcctatatcactgtgagtataaacaccctttaaccttataggcttcttgaagtataattcccaagaccatgttgcagtggtccttaaagaaccaataaggcagagagaaacaaacatgttccaaattttgttctcaggagtaaaccttactcaattgttaaaggctgtagctagctcaaaagaagtttccttgactctgaaaaacaaaacaaggatcagcaatgttccaagcaaaagtcaaaaagattatttcagtttttctattagttcagcctattctgttaactcttgttctgcttgatatttataaacattttagcttttcatgagtcctgtatgtttttcagttatcagaaacctgcatttaggaatacctgttaaagtattcctacatctgattatgaaccatattttgaagaggattaaaacaagacaacaattgtctgtaaatgacaaaatgtccagggtggttagtcaaaaacatgattgacaaaaaaaatttggttatctccgtggtttacaataacaacataacaaccttaattgtggttgatagtgtatactttcacattagagttttctaaatcccatgcagttttggaacacatattaatagtatttgctgaaatataacctgaagaagattagacatcattttggcaatcccatgtaacaaaacatgtcaaataatcctgcttgcctcttttctggatgccccagggaccctctgtagcatccaaaacgtaggtgtcaagaaagacaattgatttgtggaagcctgttaaatatgttaacaggcttaaaatatttgatgttatgtactagaattccagattactataagttatttattttgccaaaatgatgactcaaaaatttgaaaaagcaaaaacctttcattagcctttactattacatgaaaattgtgttcaagagagagaaagccaaatttcacccttacattagtgtactattaatgtcaaccacaatttttaatgaaacaattataggcaattctatccaatcttaaccagtttgacaatgaggtgagattttcacaaaccttttataaccctttacaaattttgctaaagagtagattcatgcattaagagttctttgttgtgcttttatttcaatgctcaatttacagaaaaccacataatacccttttgaatgtagtcaatatattcacacagagtttcctttgcaagattaattcttacaattttttccccagtttgcttaaaccttcagttgtattttatctactttaagacaattctttatccctaggcaaaacgtacattgccatgccttcttataattttttacaaaaaacacattttactgtttttacacacattgcatgtaaatctattcagtagtctcaattacatgtcataatggtaactcttagcaattttttttttaagatggaatcttgctctgtcacccaagctggagtgcagtagcacagtcttggttcaccgcaaccaccacctcccaggttcaagcgattctcctgcctcagcctcccaagtagctgggactacaggcacatgccaccatgccaggctgattttttgtatttttagtagagatggggtttcaccgcattagccaggatggtctcaatctcctgacctcgtgatctgtccgcctcagcttcccaaagtgctaggattacatgtgtgagctaccacgcctggccctacctcttagcaatttttaactttagtgtaaaacctggtaagttgttttaattatttgctgggtgcagataaagtttaactccttccagaataagttaggggcttggttacttccatatgttcccagactttacccattgtgaagcaggcaagttgaacagttcttaaaggccaaaggagcagtacaaccttaaaacatttagcaaacctaccatctgacctgcataatttagaccacatatttacatcttgagtacatttgtattttaccaataatccctaagactgttttatttttaaagattaaagtcacatgaactaagagaaattacagtttttactattctttcaaaaaagatttgatcggccaggcgcagtggctcacacctgtaatcccaacactttgggaggctgaggtgggtggatcataaggtcaggatattgagaccatcttggccaacatggtgaaaccccatctctactaaaatacaaaaaattagccaggcatggtggcacgtgcctgtaatcccagctacttgggaggctgaggcagagcaattgcttaaacctgggaggcggaggttgcagtgagccaagatcgcactactgcactccagcctggtgacagagcaagactcagtctgggaaaaaaagaattttatttgatctaagtgcttataggccaatcaattacagctcttttttatagacatcacacaacacatatatgactacacagacagaagaagatccagcagctcagggtggagccctttaagaataaggctacaaaagcatgcagtttctggggcctaataaacaggcatagctcgaaggccaaaacagattttgagagggatttatccatctctaattcttggggttccatgaggaaaacagatttcccccaaattgaatctgtggcaccttgtctgttttctcaaggagtccaaggccaccagaagtcatccttgagcctttcatgcatgcaccaagattggcaagacagagtggagaaaagtaattcagttgactgagatacaaaccttttccagaaaaacaagatctaagaagagaaaaacataaaggcgtttcaaggacacctataacttgggtatccacttttaattaagctgagtgctctttcataaaattcttctttactaattaaaactttacagataatataaacaatgatccttatcttttttttttttttactggtttgcatcactctttgttcacaatcatgttcaggttctccagtttacttttggggaaagtggctggattcaggcaaggacaggtttttaactggactgtagatccctctaacagcaagccctgatatttgaagaggcaattgtctgttagccagagacttcccttagaggatagcagtcctgctatattatgtggggtctaaacagttattttccggctgggtgcggtggctcatgcctgtaatcccagcactttgggaggctgaggtgggtggatcaaaaggtcaagagatcaagactatcctggtcaacatagtgaaaccccatctctactaaaaatacaaaagttagcagggcatggtggtgcacacctgtagtgccggctactcaggaggctgaggcagaagaattgcttgaacccaggaggcagaggttgcaatgagccgagatcacgccattgcactccagcctggtgacagaacgagactctgtctcaaacaaacaaaaaacaaacaaacagttatttcccattattaacttggtggcctctggcacgagcaaagccaccaatgcaacttcttggaggaaggctggccatcctttaaccaccaagtcaagttccttgcttaggtaacccactggctgttgagctggacctcgagcctttgttaaaattccctgggccgtttcctttctttctgatacatagagattaaatgtgttccctatgagaagactgagggctggtgttttaagtaatgcttgttttaactggttaaggcttttgagttttaagattccaagtattagttgcttgagtttcttttatgaggtggtataaagggtgaggtatttcaccatatccaggtacccacagtctgcaaaattcagtaattcctaagaatccccttaactgttaaaggaaatgggcttaatcctttccttacctggtgctcttgtcccttctgataagactagacctaggtactttactgaagtctgacagagctgagctttagattttgaagtcgtatatcccctttctgccaagaaattgaagagagcctcagtgctttcctgttacttccttggttggagcacagaggagactgtcatttatatacttcaaagtttaaacttgagggtgagaaaaattagaaaaacatttggacagggtctgtttcagcaacttccttctgatatcggggggtgcctgagtaataaacctgctctttattgaattgggagacagggaggtgtgtttcactaaggcctctctcagcctttccataacggctgagggattttcatctgatttttgatttaacatggattgtttagagtaattaagaggtttggttttgttttttgctagccttttaatatgcacatcagaaagtgtattccactcatctatgcgatgactagtctccacttagggttttcaaggggcactgtttatcttcctactgggaatgggaatcctgtctcttttttaccctctttccccttttgactgggtttcttttttgactggctataggatacatgctgtttgtcggtgaatctctctgctgccttagggctgcctgtttctcagcagcagttagagtttggcttaggagtaacataacatctccccatgcaagatcaaacatttgggttagattttagaaagcttttatgtatctatcagggtcatccaaaaacttgcctaagaccccctttgtttgtctaaggtactgcaatgatatgggaacttgaactctagtggcaccatgtccattgggcatttcctgcagggtcaacagtgaagttgagttttcttgtgtggcacagctggaggagctgatgcttggctattggaggccccagataagggatggggaggtagagcatccagaagttgcatttgagggggttttctgactttgcggtgttgtccactgtgggcttgtctgatatgactcttaagagggcagagtcaattttgcagtgcttacaaagagctgggctgtttcacagggcaaagaaggcttgcacataggggacctcagaccgtttgccctcccacgtgcagaaaagatctagttattggatattattgaaattaacacttccctcagcagcccaggcctatccatcctggagctggtaagatggctatgtcctcgtacagaagaatataagccatttttcttcagtctcagggttaaaagtctcagtgtctcaggatgcactcaagaggagtgcagactgaagatggtttgttacctgttttaaaaagagtaggagaaaaggcgtcccttggtctttttcctttttttggtgtgacccagggtggagggaaagatcgaaagtgcatcccacttctctttcttcccatactctgggtcctggccaccatcataggtgtcacccatggatgcaagcatgaccttcacccgtggatctggaagagctagttgggtgtaatagtcatgcttacctgtatgaggacctgactctccacgctgctggtttcctagtcccaagtggcccataaggctcccagggtaccctagtggtctgggagatattgtatttgggtgagaccctttaatggagggagtgttttaatactatctctggcttcccttgctatggccctagcaaaacattgaaatcccagagaatgggaccgattgacttccaaatatgaaatcttctttttatttaaatgccagtgtagttcaatgcagaacaggtgactcaaaagaacataaggattgagtggctgttctcccgactgttaaaggtacagctttgctgttaacagatggagcatggagcttagtccctaacagaggcacacaggagggagaggaattggggaactaatggttttgcacaaagggcagatagggctccttatggagaaaaaatcctatttcacttggtggcgctgtaggatctgaaatgttaaataagaactctgactccaaattctttccaggaagaagttagaaagagaggtttgggcttaataggctgtccccattgtatgccttccagaagaagaaaattaacttgtctcataatggaactgtctagattcattgggcagtcctgagcttttacatggaggaaaaacacaacccaaatggagagggagaagggtattcactcagcatgaaatatcccctctatacagtgccatgaatgtctgtcattagggacaaaaagctctcactaggtgaaagtttagacagaaatcctctaattgttctaattagatcaaacctctatagtaaacagttcaaaaattatagtgtcagggaatcatcttcatggttgctggacttgtcatcaacatccccaggatctagagttccatcttctggcctatctggaaaacctcacagacatctacccagtacttctaactaaccatagcaatcccaaagtaccaaaacccctacttattcagtggaactctccttcacttaatggattccacctgaatgtccccttccacacttgccattatacctggacttgaaaagttgagtatatctccagtgcattaatgattcttttgcactcactactatgttaatgacacaaaagcagacgtttccctgtgatgctctgatctaactatagttaccaagtttccaaggcaacagcaaggtaaatggtatttcacttgtaggcaagaagaccatatatgatgtcttctcccagaccagaacacacgggaaaaaatgactgcctaatctgggagggtgggagtactattcgcttctggaaaacaaggtttgtttgaccacccccattggaacaggggaagaatatctctatagacccaacttggcagcaaaggatagacattacaccctgtaggacctctatgctccaactggactcatttttgtttgtggccatgaatgagaagtcacatgctgtaactactcctggctccccagggagccatctgttcttttaggagtagctttcccttatatatcaaaaacttggaacaaagataaatgtatgttgaccacccttgcccctccaagggtcacagtctataacccaataaggcccaggaacaccagaagtcaacaagcaataggattaattctggtgggaatcagggcagccataggacaagcagcaccctagggtggctttgcctaccacaagtcaaccctaaagaacttgactcaaactctagaatccttagccaccaacacaggttaggcactaccagcaattcaagaatctctagactctttggcaaatgcagttctcaataacacactggcattagattatctactagcggaacaaggtaaagtctgtgcagttaataaaacctgctgcacatatattagcaactctggataggttaacattcaaaagatctataagcaagtgaccctgttatgtatattttctttggctcttgcttgtttaacctcttagtaaagtttgtgttttctagatcaatagtccccaacctttttggcatcagggaccagtttcatggaagacaatttttctatggatggggtatgtggggctggggctgggggctggtctcaggatgaaactcttccacctcagatcatcaggtactagattttcataaggagtgtgcaaccccagtcccttgcatgcacagtttatgataaggttagcacccctatgagaatctaatgctgccactgatctggcaggaggtggagctcaggcagtaatgctcactcacctgccactcacctcctactgtgcagcccagttcctaacaggacatggaccagtatccacaggagaggggttggggtatcctgttctagttccaggtaaagacaatgctggcacaaggcttccaacccatccttgtctactattccagagaatggaagtgtccttcctttggggaccttatatgtggtatccagggatgtttactcctttagtgctaggcagggcctaggcccacaaaatcagcagcaagcagtcacagagcccccttaagattaaagaggagtatctaatctctgatgggagagtgagataggaggcaggactccataccagactgaagactggctgaaacagggaacaggcaccaagagcatatctacataatacacacccaccagtgccatggcagtttaccatcaccatgacaacacccggaaattaccatcccttttctagaaatttccaaataacccaccctttgcatgtagttaaaagcgggtataaatatgattgcagagctgccccctgagctgatactcgacacactgcctatggggttgccctgctctgtaggagcagccacagagttgtaaccctgctgcctcaacaaagctattttccatctaccactagcttgctcttgaattctttcctgagtgaagccaagaaccttcttggactaagccccaattttggggctcacctgccctacaacgccacctgatgtcctacctctgtgctttctaaaaccatctcccttaccactggaagaatataacttaggcctcaggaaatgaggataattcatgctgacataaggagctctttaaaaaataaaaaagcagctgggcgcagtggctcatgcgtgtaatcccagcactttgggaggccgaggcagctggatcacctgaggtcaggagtttgagacaagcctggccaacgtggtgaaacctcatctctactaaaaatacaaaaattagccgggtgtggtggcacacgcctataatcccagctactcaggagactgaggcaggagaatcgtttgaacctgggaggtggagtttgtagtgagccaagatcatgccactgcactccagcctgggcgagagtgagactccatcaaaaaaaaaaagaggcagcattatataataagatacctgggggatattgatggacatgctaccttggagtcctgcctagctcagccccttcttcgagaataatccactacccacagtcctgttaaccaatctctggggatacctgacccaaccaggctagatcaagttttcttgcctgaattctggaataaggacctcagacagagggcagagtgtgctgggcactagggtgaggatttgtgtttaaagggctgtttctaccccagtgatccccagtgcagacacagggagaccaggcaaaagcatgtgagaccaaaacagagaatacaacaggacctgtgggtagagggagaagggcttgagatgcctttctcaccaggcagtatgtgcaagaggatggaatcagaggactagggtcacccacatgggacagaaataaagctttacccagcaagaccaagagcccacagttctgcagcctcacatcttggtgcagtgtcctctgggccaggcccaaatatccacatttctaccagatgaaggtcagggccatgaccttgaaaggcaccaatgcctggcaagtcaaacagaaagttgacctcagactgttagatattagaacctattgcttggtcactgggaaaggcacagagaaccaggacatctgagggttgagctccatgtagggcacaagggtgagggacactgcctctgaaaatagggtaactgtggcagaggataaagcctatgatgggggatgtcatttccaagttaaggtttctgctacccaggctccttctgattctctacctcccacatgtcctcctgcactcacattaaatcatcccaagtaatcctccaggttgcttgcctggctccatgctctgacaatcatgctgcagaatggagctgttccctctaagccaggctatgcctacactgtcacaccttgtacaaggagattgtgtgtgttgtaaaaatagacacagccagttactagatgtgtagatgcacttttaccacaggcacatttgttttgctattacctcctccactttctattaatcatacccaaaatttctgtaccaattatgtcccatgcttagctcccatcagcttgagtaccaccatctatggaatcatgggcatcagggcacataggttcctttgcagaagctgggaaaaagcttcgtctcaacagtgctgggcattacagcctgtagaacaatgcaataaatccatcttattccctaaagcacaggagcctgtcataacagccgacttgtcctcaggatgacctctggtccagagaaagtgtagggatccaggccataaattaggacaacaaaattcttgcattgtttcctaggaggccttgagcagcaaggcaaagtggactaaaaccagaacaagaactactgtcattttacttttcctgcacaggccagcaacattggggccccacaaaagctgtccatgcctttatgtaggagcccaaatgtgttttccagccacctcacacagtaaaccaaaccctaagaccacacatagatttaaaaataaggcctttattaccacacaaaccagagcaatgtgaggcagccagttactaggtggtgacttggaggctggaaaaactaccaagtgttgtgtgaaaacaagaatttccatgaagggaagccttccacatcagcttccagcagaacccaggctgggcccttctggccaaaactggtcagatgtatgctgtaatcagtcagaaaagggaaggaattccccttaaaggctcagactgctcaaggaatttcctccaagggttgggagaacacaggtgtatctgcctcgccttagtatgcaagggtgactaatgatttaactctggcaaaggcctccagcagtttagaacatgcaaaggagctcctgcaagacacatatgcctggaactaatgggagtctgacccatcgggaggtctagaagtatgaggtttaactttaggcagacggctccttcacaaaggctctctatagccataacactgaagaaagacatggcacattccctgcaggtctaaggcttttctcaggtttggagtttcaagagttaaacaatgttagatcttgggctgtagggttttccacatttgctgctgtcacgaggcctctccacagtgtgagattttcggtggagaatgaggccagagtgttgtgtaaaggacttcccacatttgccacactcatatggcctttctcctgtgtgaaccacttggtgttgaatgaggctagacttttggataaaggatttcccgcactgtccacagtcgtaaggccttaatccagtgtgaattttctggtgttcaacgagggtatagctttgtctaaaaaatttcccacattcactgcactcaaaaggcctttctccagtgtgagttctctggtgcctaacaagtttagatttgaacataaaagctttcccacattccccacatacataaggcctttctgcagtgtgaactttgtggtgtttattgagggtggttctttggctaaaggattttccgcactcatcacactcaaagggcctagctccactgtgaattaactggtgctgaatgaggccacactttaggctaaatgatttcccacactggccacactcataaggccttgctgtagtgtgaattctctggtgtacaacaaggctgaagctttgtctgaataatttcccacattcaccacactcatatggcttttctcctgtgtgagttctctggtgtcgaacaagagtggatttggacccaaaggcttttccacattcatcacactcataaggcctttctccagtgtgaattctgcaatgttcaataaggttggaactttggctaaaagatttcccacattcaccacactcgtaaggcctttctccagtgtgaactctgtgatgtttaatgagggtggctctttggctaaatgatttcccacactgaccacacacataaggcctttctccagtgtggattctccgatgatcattcagatgagaggtttggctaaaagatttcccacattcactgcactcataaggcctttctccagggtggactctttgcagctgaacaagggagcactcacagcagcaggctttcccacatttgctagattcataaagcctttttccagtgcagactctagggtgaaaaaaagtgtgtttgtggctggactctctcctgcattgactccacttgtaatgacttattccaacatgaaaggcctcctcacatttgctgattttgtttggcttctcatagttagcaatagcttgcggctgaagaatgcccaatggggctaggaagtccttcccaacctcactgctggtgaaaggcattcctgactcatggaacaggcagcactgcacaaatgaggccttgtccatgtcactttccaagggtttctctgcactatgatgcttctggtcctggtgaaagaccgcacatgccccagtcaagtatagttcctgcccaggcaaatcggtcaggtgcaaaatgtcggtcaggaatgggacacacatgtcacaggattgaatcttctgggtggatggactggcctctggagtcctgacctgaggtactccttctacagaaacactttgctcaggtgtctcttcatcctccatcccatgccaacaaactgaaagcagagaaacactgatgaaatgcacgttgactatgatgggagtgtattagtcatttaaaaaactattttctgaataattggtgttctgacatcttaaaaactttgctggcctgagctcaggagtttgagaccagtctgggcaatatggtgaaaccctggctctactaaaaatacaaaaaattatccaggcgtggtggtgggtgctactcaagaggctgaggcacaagaattgcttgaatccgggaggcagaggttgcagtgagcccagatcgcaccactgcactccagcctgggagacaaagcgaaactgtctcaaaaacaaaacaaaacaaaacaaaataaaaaacattgctggctggggagagaatggtgcttccagagtgagccaactcttaaagagatagcaaagggctcagcaaggagcataacaaatacaccatcaatccagagcccatactcccaatcacattttctatgtgacttggatgcttcaggagctaatattcctctgctctagtcatcccaaggtcaggcaggagacaactacgcctagtgagcccctttgccccaaagcaaactactcaaattacccaatcctaaactgtttattatgtcttgtgttacctgcagaaaccccaataaaggctgtggcttaatattttccctcctctcttgcttctaccttctgaccactgagcacttcctcatgtggccctgcatggcatggtgttcacatgctcttgctactgcaggtgataaattcctatgtcactgacattaacctctctgtattggcactctactacctccattaattaaaatcctgtgggtacataacaggaaatgggaagcaccttcacatatacatcaaggaatgaattcacagtattgctttgaagcaatattgaggaactgaaagcaggataagaaagaggctgcttggcagtagtgggcctctaaagatcacaaaatggggaggcctcaccaaacacaggacgtaagaatggggtacagtacacaaggagaggcagggtctccaatctattcttttgccaaatcctgtggcaagatcttgtcagctggtggcacgtgtatgctgtgctgaaagctggcattattcgggcccaagataatgcaattggaagtgagtgggagattccaattgcgatcttgtgttcaagaaatatttaattggcatgtgcacaactcacaacatatcgtgagtgggtcagtgttggaaaacatgctggggggcagtgcagagaaactggtgacacatggagggcaggaagatgggggcagcacgaggccggatgtcccagatgaagcaataagccagcaaagtgtcaaggaagaggaagaaaacatagaaatgagatgtgtccagtggcattagcaccaaactctggatgacacagggcaaattcctggtaagattagaaaacaggctggatgccatgtcctcacccaggtgccactgactgaggccaggcttcctctgaagccatattcccatcttcaccctttccaacaaccagggctttcccaccacctctagatgtgccactacttgggacctgaatgaagcaagtcctaagggaaagctgggacaggtgagtatcctgcagtggcccagagcaagtcagcagccttgagaacacaagaaagaaaattaatatcacacagatccttgaaggaggttctggcaaccacagctcatggtccatgtaaatactgatgaggaaaattctgcaaattcctaacacaggtagtcaaaggaaatgtcatctaggaggcagaatttgagacacaaagtaccatgaatatggacacagccacccaaagaggaagtgaagaagtaaacggagatgcattaggctgactcaagacacctaacagccagacccatccctgtgcattttgggacagcaaatgtcagggctgattaaggagtgcaatgatttcattccttacaccacagcacatacgccaagacagtggggaagtcagcaaagcccacggtccggcagagctgcctctgaggaaaaagaggatagacgaagaccaggacacgagagtgggtgtgagggccttacccagcgcagttataagtgcaaagttctccagcatcacatcgcggtacaggagcctctgagcctcatcaaggagcccccattcttcctgggagaagtaaatggccacgtcctcaaaggtcacacagccctgccatgatggggatagatctttccatgatcagattctctcctaggaccccaagttcatgccccccacacatcctttccctgcttatccccatacctaagccccacctcagaggagataccaagacctggtggcactgattcctgccctctcctcatggtcccatcatcactgtgtcttcccacagcaccaacaggcaggtgggccaggaaatgccattttaaactctgggtctagcatatagggctggattttgtcttgtcagacagttctcctggggtttccaaaattatgccactcacatacaaacaatgatgaggtttgccatcattcttatatcctcaatgccatggccatgggttgttcagttcacacttcctctccatatgcacatcactctttgaagcacacactctctcaaacaatctcactcccacggctatttccaccctgttgccccacaccataggcatctctctggcatccccacgatagttggaatgcaacattcagaaagtgcttggcaaactgaaatgaggtccggtgccactcaggctgaatggtccccactgccaaaggcagcccttcagagaccctgctctgaaggcctccctgcctgactctgtccctttctacatcctcagtcacccagaaatacctggggatctgacaccgatggccctcttgcactagcgctgcacttgatgtcctctcttaagtcacagccttcctctcctgctaaccctcattcaaagtctgccccaggggacccccacacctcaggcccaataactcccagatgaccacctgtgcccctcaacttatccacctccctgaaattcctgacacctcaagggttgccacaaaaccctggtagatatatccagagtgctgagtaagcactagttctggtctcagtgtcatcttgtctcaattacttccaagcattgatctcatgcccactcttctcctagatccttggccacttgccagatcatccttgctctcacaccctaccatagccacctctctcccatacctgtctttgtgattcccaccatgaccaaccatgtccccaagcaggagagccagtagtgacccccaaccttccttccctgggctggtaatagcattaccaaagtgatcacgattccacctcctaattgtgtcccaagctatacccctaggcaagtagtggccaccaccttttaaatgtctctatcctgaatccctcaacacagttctagtcctgtaggataaactatccacttcatgtctaaactaactgttctttgaaacatctcagactctaaaagatgtcccattgggccatgttcagatgatttttattaaaaaattttaaaaataaagatggtccatatcaaaatttctgattatctctagagataactgactctactaccaactttacaatcctcgctagtggagcttccatatttccagctgctaaacccaaacaccttgcttttacccctaaatcctacttttctatctcaaaatccaggcttccctacttaaaaaaactgatctaaaatccaactaccacctccacagccaccacacaagtccagccaccagtaacactcacctggactactgcagcagccttcttcactatcttcctatctcatacctcacactcagcctgttctctcagcttggccacacacagggaacctgatgagacctggatcagatcacatacctcctctgcccccaaactgtcattgctcatcacacactccagaagaaacacccgacaactgacagccattttttgtctgattcctgcatcccagctttcagttcccatgagaaagaaaacagctgtagtttcctaaaccagctcagcctgaccttcaagcacttgctcatctggtatctaagcctgagacaacgttccacaccttactttactggttcccagcaataggaaccattctataccagcttccagcctggatgtatgaccctgggactgatgtttgttcaggattcctagaaccaaggacccaaagagtgccaagagaagagtcccagaacacaatctcagagacaaacactggggtcagcatcagtgagggcccgaaacactctccactcacctgtgtaaagcccataagtttagcttctgcagtcacgggaacctgcgggaagaggaaggctatgagaggcaggtaactatggtggaagctccatgggctgatgcctccttgtttccctgcgcagccctggagccaggtgacttggtgatgactaaattattattgctcctcagttccgtgtgactcttacctgctgtgggaccttgcacaaggactcaacttccctgtgcctcggtgttatcccccttccaggctgttccaactctgagtaactttagaaaaaatttgaaaagtctaactcagaccatgtgcctcgtctgttcacaaccacccatggctctcagcgtcttgaaaagaaagagcctcattttaccattcgggcgtgaacgttactggctcaatcgtcccagcaagattcacagaaaccggcccctccgcctgccacaccctccacagcccacgacaccaggcttgtaaatgggagccccacccgcgagggcctcatagtcctggactctagggtcgggctgcagggacgcaagcaggcgcccctcatgcagggtgttggatttccggcggagagggcaggtgaggcccgggagacgcagcactcaccgaagtcgaatccctaagcacggccgccgccatcggattgtgagcggagcggggccgggagcggcgggcgacccggggcgggaacccaggcacggctgccaccagcgccagcgacccaccggctgatgcgcagcggggcgacccccgctctgtgccggaggcagcgtttctaactcaggcggcgtgggccgaggtagagaaccaccaaaattaccatctcggagcggtgccggaagtcccgccttaccgtatgcaacaaacggagacaggtccgttcctgaacgttgattggctccgcgtctttgcagcttggcgctcggcattatgggtaatgtagttctcagaagcccagggttccggtgccctccctgagattcacccggaacaagggctaagcggcccgcggagggcgctaggaaaaggcgcgacaccaagagcgagacagggacttgctgctccttaaaggggccgctggccgatttccgcagtcccatacccactgaagggagtgtctgggttaagataagaggttgtagagaccaaggttcttattaagcagatgaagctttcacgcagcaggcttcagagggaatagattgtaaatgtttcctatcagactttgaaaggtgccagactcttaattctttcctggaccatgaaaataaaaaaaccctggagaggaaaggggattctcagcaaaatgcagattccacaagacacacctttgcagggcctcttcaaaatatgtcaaataaataaagtttagagtaaaatacttcaattcctttcagggcctgctatctgtcatgtaatgctatactacaatcaggctggaattcactgtcttattgctacaagaagtcttaaaatctctgttttaatgttaatgctggtcagttgtgcctgaattccaaggggaggagggcaagtctgaccctcacttcccatcacgtcctgaactagtttttcagattaactttggaatgcccttggccaagaggaaggatgcattcagatggttggggggctgggaattttatttttggtttacacttctcatgcctcttggaatctctgaaccacatacaacggccatttgttgagtaaaagcttccaatgcaggaaactgtctctttcagcctcatgctatacaccattaaaacagtaattactggcaataagactgggctttcttaaacatacaggatctcacagaccataagcctatgatccttcataccagctgcccataatacttttggttttggaagcagcaccccataacctcagcatggctaccaaggcctccttaagacagggtagaatgaataagatctagtatttgatagcacagtagagagactacagtcaacagtaatttattgtacattaaaaacaactaaaagagtattataactagaatgtttgtaacacaaagaaatgataaatgcttgtgtaccctgatatgattattacacattgtatgcctgtatcacaatatctcacgtatcccataaatatacatacatactatgtactcataaaactaaaaattttaaaagacagataaatggcaagcaggtagatgaaaacatgcttaacatcattgatcactataaaaatgcaaatcaaaactacaatgagatatcatctcactctagttaaaatgacttttatgcaaaagacagggaataatgaatgctggccaggacagagaggaaagggaaacttcatacgctgttggtgggagtgtaaattagtaaagccactatggggaacagtttggaggttccccacagaagtaaaaatagaattaccatatgatacagtttacaccacccagaaaagaaatcagtatatctaatagagatctgcactcccatgtttattgcatcactattcacaacagccaagatttggaagctacctaactgtccatagataaatggataaagaaaatgtgatgcatatacacaatggagtagtatttagccataaaaaaagaatgagatcccatcaattgcaagaagacgggtgaaattggaggaaattatgttaagtaaaataagccaggcacagaaagacaaacttcacatgttctcacttatttgtgggagctaaaaatttaaacaattgaactcccggagattaagcttagaaggatggctaccagaggctgagaaggatagcagaaatggaagggaaagtggggatagttaatgggtgcaaaaatatagtcagatagaaggaataagacatagtatttgatagcacaacaaggtgactacagtcaacaacaatctattgtagaattaaacataactcaccgggcatggtggctcacgcctgtaatcccagcactttgggaggccgaggcgggcagatcacaaggtcaggagatcgagaccatcctgactaacacggtgaaaccccatctctaaaatcaaatctctataataaatctctaaaaatacaaaaaattagccgggcgtggtggtggtcacctgtagtcccagctactaaggaggctgaggcaggagaatggcgttaacccgggaggcgttgcttgcagagagctgagatcgcgccactgcactccagcctgggcaacagagcaagacttcgtctcaaaaaaaaaaaaaaaaaaaaagaattaaacgtgactaagagtataactggaatgcttataacacaaagaaatgataaatgcttgaggtgatgaataccatttatcccaatgtgattattacacactgtgtgcctgtatcaaactacaccatataactcataaatatatacacctactatgtacccctaaagactaaagataagaaatcaaaaaaataaagacaggatggagctaaacctgggccctctggaatgttctacctgcagatggagctggcctccactatcttcagtcccttgctagatgtcatggtccttgaggtcaacactccccacacctgcggaatcccttgggattaactgggtgaacagtaatcgaagttagtggactatatgaatgacgctgccaagctatacttgaatagctgtgccaaatagacaaacacagaaagaaaacacaaaacaacccatccacatcctaagggcttcacactttcttgcactctatcttcaatgttttttcagctttctctttaggtacttattgactgttggtctcacataagtttagccatagatggaatttattactgctttgtgaccactggcagcctccctcatctctggctgggcttctccctgaaggactgggcctcaggagtaggtgggtcatttgtcccctgggcatgccacacagagcaggttttccgaactaggctatccctcctccccaagttatccaggcaattccgctagttctatgcctagatggacacacatgcttgaagtttggggagccatgtttgatgtgatgtggcaactctgaaaggacagtgagggtgagggcaggtgttaggtggccattgtgggggctgctggcctctgggaccagagggtaatgaggtgcacaaccgtgtcacctagagggtgccagtgttaataaggaaaagggttgctgtccgacgcacacagaagccaatgccatggcaccaggtttttgagaaaagcaaacctttattgcaagtcgacaaacaagaagacaggagtccagctcaaatctgtctccccaatatggggtttggggcagcttttaaggattaggaaggacaggttggtaagcactggaagggtggattttgattggaaggacttcaaacaaatctattgatggcaaggcggggatggggttgttatcacccaacattcagagacaacagaccccttgctttcggaagtgtttcagcacttgggttccagccatagcctgatattttggtttcctgtggtgacagggtggagtctggtaggtgagacttcagctccgagtgttgggtcaatgttttcttttctcttttctttttatttatttatttatttacttatttatttattgagacagggtctggctccgttgcccaggctggagtgcagtggcataatcataactcactgtaaccgtgatctcctgggctcaagcgatactcccacctcagcatcctgagtagctaggattacaggtgcaccaccatactcgggtaattttttagtttttgtagagacggggtctggctatgttgcccaagtggtccttccacctcagcctcccaatgtgcttggattacaggtgtgagccaccgcgctgggcctgacattttcttttctgcacattctctagctgtgtaacttgcaactctttagctctgtgcctgcaaaataactggacattatgttaccaacagaggatggccagatgagactggtccagtggttaaacctgcaccttcatggaggccattatgagtatccctacaggccgagtctcagggtgcccccagaagcccataccagccgctgtaaggcagagcatggacttcccctcggggactaaatcccattcttgggctccagaggccttgttcctaccactgtacgccaccgcttggggtgccctgggaacccgcctacctccctactgccctgagggcggttggagatggtcccagcaggtgtgggagatgaggtaggagacgtcttcaacggggtccaaggctcatctggacccagttctcagccgaggggcggtggagagggcgtcagaaaacgcaggaacggctcctagacccaggaggggactcagggaagcagaggcgctttcctcggcggctctggggccttcccagctcgcccggcccccctggaggagacgtcccccggggtggagctacggagaaccccttcccatgggacgtctcggccccgcctcccgcctctgggtacagtcaaagggctcaggtcagagcaggagcagccgggggcgcggcccccacgtggcctcccgggacacgtgcccacagcgcgacacctaagtcgctcctttcacagaatagccttggccccggcacggcctcgaacgccttgaccccgcaagggaggggcacgaggctcctttgctcccgcaggagcgtcgaatacgtatggaatacgcgtcggtgtggatctggcctcagcttcctgagcctgaatcaatgcttctaatcacgtgggcgctcagccgcgacgggaccacagaaatcgaccagcggcctgtttaaggagcgacaaggcccagccctctcctgcattgtggcgacgccatttccctgcgcccccagcgcggccgcttggcttttgtttgaggtgacgctgggcggcagcatccttccctcagccctggggaccagcggggactacagaacccagaaggttttgtctccagccgcagggatgctgagccaatccgcgctgagaaaagggtcgtttccgctttgggaccaatgggtcggggagggacttccggtatcacttcagtggcggtcatttttgcagcgcttgggtgcatccagaccgtcagagctttgggagcgctttgtttggcgacagtcggaaggcgcgaggggaggggtcctcccgctgaacagtgggggttctaagggtcggcggcggcggggttgacggctttgcctaggtccctccgcccgtagctgtcgggtcccggccccgctctgcccacagactccgatggctgcggccgcgctgagggccccgactcaggtgagcgctgcctctactgggcctcaccctccatccccaaattagtgccttcttgggtcactacggtcgagatcctcatgtccagtacagtgggggctcgtgggtggggtccctatttccagaacttgggtgatggggcacggaagagggttacaggcaaagggaccagcgtttctaaactcttggagacacagtgaagaaggttcatacctggagtgccaaggtgaggagttttccctcaattcttaggatgctaggagccgtggagggttgtgtacagaagcggcatatggtctgagttaggtctttcgaagttttccaaaaacctcatggagttagactagaatagaatggaataacacagaggcacagggaggttgagttcttgtgcaaggtcccacagttgctaagagttggcactgaggactggaacgctgaggctcagaaataatgcaggcatcctcagtccacctggctctggcctggacaggaatccagggaagcctgaatccgtagagccctgtatggtcacctgcctttcatgatctttggctttccacaggttactgtgtctccagaaacacatatggacctcacaaaggtgagtggagggtgtcccaggccctcactggtcctggccccatcctggggttttttcatggatctttttgccaccatccagttctttgacctaaggactcttcacaaactggaagcttgacatcctgattctagactggtggttatttgtagacgttcttattgctggcagacaatggaatgaggtgtgaaaggttgccccgcctacgtacaataatgtgtaaggttggcagtgaagctgagctgattcagggaaacacaactctcctttctttctcatgggaactcagagcagcagggcaggactcaggcctggaatggctctgagaaattgggtgttttttctggaggtgatgagaacaatgggaggtttagagaagagaacggaggttatctgacactggtctcatcaggttcactgttaatgcagcatagagaatactctgtgggtgtgatggaggcgatagaaagaccagggaggaggctactgcagtggccaaggtgagttttgatagtggcttcaccagtgtggtggctgtgaaggtagaagaagtggctggattctgggtcagaattttaattaggcctgcttgcattttcagattttgagggtaagagatactggtcaagcattactccaggcattttgaatttagcatctggaaggatggaatctccatcaaatagcatgttataggattgattttatttttattttatttatttatttgtctatttttagacagtctcactctgtcactcaggctggagtgcagtggctcgatcttggctctttgcaacctccacctcccgggttcaagcaatcctcctgcctcagcctcctgagtagttgggactacaggcacatgctaccgtgctaccatgcccagcgaatttttttttttttttttttttgtatctttagtagagacagggtttcaccatgttggccaggctggtctcaaactcctgacctcaggtgatccacctgtcttggcctcccaaagtgctgggattacaggcgtgagccaccatgcccagccaattaattttcattaaggataacaggagttttgtctttagctattatcatagtctgagatattccaaagaatgatatatggagacatcaggtgagtagctgtccatgtacatctagaattctggaagtggtttaagatggagaaatccaaaaggtggtggccagtgtttggcccagagtagctatgggtcacaattaggagtgggtaatcctggtcttgaagataatgctatttataatgcaggaaagggctgggtgtggtggctcacacctgtaatcccagcactttgggcggccgaggcaggcggatcacttgaggtcaggagttctagaccagcttggccaacatggtgaaactccgtctccactaaaaatacaaaaattagccaggcgtggtggcaggcacctgtaatcccagctactagggaggctgaggcaggagaattgcttgagcccaggaggcggaggttgcagtgagccaagatcacgccactgcactccagcctgggtgacagagtgagactccatctcaaaaacaaaacaaaaaaacagaaaagggaaggttggggctatgactgtgtctcatgcttggacacgtggtagaggtggtgagcatcacaaacagttgtgagagaaaagtggtcatgggaagattgtaggaaagaggatgatctggtgtatcagtccattttcacactgctgataaagacagcaagtctctaggaagttccagactttcccatattttcctgtcttcttctgagccctccaaactgttccaacctctgcctgttccccaattccaaaattgcttccacattttcagttatctttacagcacagccccactttactcatactgatttactgtattagtccattttcatgctgctgataaagatgtgctggagactagataatttgtaaggaaaaagaggtttaatggactcatgattccgcgtggctggggaggcctcacaatcatggtggagggtgaaaggcatgtcttgcatggcagcagacaagagagaacttgttcaggggaactccccccttataaaaccatcaaatcttgtgagacttatttactatcatgagaacagcatgggaaaggcctgcccctatggttcgattacctctcaccaggtccctcccatgacatgggaattgtgggaactacaattcaagaagagatttgggtggggacgcagccaaatcatatcatctgataagtggtcaaggcttccaaggcattagggacataagacagacatggagataaagaaataattggtagaagatgacactgaggccaggtacagtggactgtgtccccgcaaaattcatatgcttaaagcctaattccagtgtgatggtatttggaggttgggcctttgggagataattaggtcatgagggtggagccctaatgaatgggattagtgagtgctcttaaacaaagaggccagagagctactatctagtgctctttccaacaagtgaggatacaagaagtcagcagtctgcaacctggaaagagtccctaccagaacctgaccatgctggcactctgatctcaggcttcctgcctgcagatctgtgagaaataaatttctgttgttgataagccacccagtttgtggtattatgctagcaggccaaactgactaaaacactaggactagtgcttattcaccatggtaaaaactcgccaggaatttgttgtgacccttggtgagtctggggagggtgtgagtcaagcagttgaataagtttaggagtacaagtgttcatctgtatgagtcattaggttggaggtagagagccactgagagtctgtgccactgaggccactgattttgaatgagggttaagaggtgagaagaaggttgttgattgaagaggggacatcaagtgcagcacaagtggaggacggccatcggtgtctgacatcaggtgattcttggtggctgaggttgaagcaaggaacagagtcaggaagatagcccttcagagcagggtgggggctgtctatgacagtaggaaccatcagaggtctgtgtagcactggatgatgtctcaatttggcaggcagaggggtggaggtagccgtgggagtgagactgagcgagtatggttcaaagaatgatgtgtacatggagagggagtgtgaactgaaggacccaggcccctggcattgaggacttaagggtcaaaggtgaagccacatttgattgtgtctaggaggcactatctgaaagacccttggggaactgcctgacaagaagggatacactcctacataccgggcccaaagtttagatgtggtgcatcctgcccacctcctggttggtgctgtagaaggatacagtgatcattgggaccatgaaaagagagtgggcatctgtgtcaccagggcctgtatttccttaaggtggggatgattgcgtgggtggatgaacttgtggaggcgttgattgtggagtgacctgtccccatcatgacagggctgtgtgacctttgaggacatcgccatttacttctcacaggacgagtggggacttcttgatgaggctcagagactcctgtaccttgaagtgatgctggagaactttgcccttgtagcctcactgggtaaggccctaataccaactccagtgtcctggtctgtctatggtcttttgctgacttctccactttcttgggatatgtgctatgggatccagcactgtgcactgcctgagtagccctaacacctgctgcccagtggtctgggaacacctgctgcccagtggtctgggaacacctgccactgggcagcaggtgttcttcagtcagccaaatggatctctgttccttgctctcttcttggctgggtgtctgtgttcagatccatgacaccttgtgtcccaagttccctgcacccccatctgctagctgacattttcttgtggctacctgtgtcatgattgtagtcattgtcattgtctatacttatggggacaatgggctcttcttactcactccttctagtttgtttgtttgtttgtttgtttaatgatattaactttcttgcccatgggctgttgtgtgctgagtcgttctgcatcagtgctgatcactcacatgttctgtctttctggtaggacttggcttcatgaaggtcccacatagctagacaactgagggtgtgcagagaaacctggttgctttatagggtgaacatggtctcagagaaggcctgggcttgttgagtggcaactggttgggggcatgatatccgggctgttttccgatcacataaggagcctgtcctgtcttcaccactgtttgggtgcacatgccactggccaaatctcatttctatattttcttctcagtacttgacacttctctctcttattatttttatctatgacttctagcacctggctacctccacctttctgatcttcatgcatcatctgcttctctgcactgctccctctgcaatgttttccaacattgacacacacataatgtctcatgaagtatgtatatatgaccacatgaagatatgtgatcatatcacttgctactcagtttcaattgtattttcctgggcttgggcacagtcaaccttctgcacagcatgcaggtgtcaccagcagacaaggtcctcctgaagactatgtggtgagttttaggaattggaaggctactcaaggataatttttgaggctgttggtagaggaatggtttgaaggcaatgccattccctgtccttcatcccatccttgtgtcctttatttggtgaggcctccctcattctgtgatctttagagatccagtattgcaaagcaaccccttcctcaacttgcccccagctccattatcctcaaaacaaacctggtgaatcattcgtttggtatgtgtgtaatggggcttcttgctctcagcatagtcaatgtatatttcatcagcggttctctgctttcaggttgtggccatggaacagaggatgaagagacaccttctgaccagaatgtttctgtaggagtgtcacagtcaaaggcaggttcatccacacagaagactcaatcctgtgagatgtgtgtcccagtcctgaaagatattttgcatctagctgatctccctgggcagaaaccatacttggttggagaatgtacaaaccatcaccagcaccagaagcatcacagtgcaaagaaatccttgaagagggacatggacagagcctcatatgtgaagtgctgcctattctgtatgtcattgaagccctttcgcaaatgggaggttggaaaggaccttccagccatgttgcggcttctgaggtccctggtctttcctggaggcaagaaacccggcacaattactgaatgtggggaggacattcgcagtcaaaaaagtcattacaagtcaggtgaatgtgggaaggcttccaggcacaaacacactcctgtttaccatccaagagtctacactggaaaaaagctttatgagtgtagcaaatgtgggaaagccttccgtggcaagtactcacttgttcagcaccagagagtccatactggagaaaggccttgggagtgcaatgaatgtggaaaattctttagccaaacctcccacctgaatgatcatcggagaatccacaccggagaaaggccttatgagtgcagcgaatgtggaaaattatttagacaaaactccagccttgttgaccaccagaaaatacacactggagcaaggccttatgagtgtagccagtgtgggaaatcctttagccaaaaagccacccttgttaaacaccaaagagttcacactggagaaaggccttataagtgtggtgaatgtgggaattcctttagtcaaagtgccattcttaatcaacaccgaagaattcacactggagcaaagccttatgagtgtggccagtgtgggaaatcctttagtcaaaaagctaccctcattaaacaccagagagttcacactggagaaaggccttataagtgtggtgactgtgggaaatcctttagtcaaagctccatccttattcaacaccggagaattcatactggagcaaggccttatgagtgtggccagtgtggaaagtcctttagccaaaagtctggtctcattcaacaccaagtggttcacactggagaaaggccttatgagtgcaacaaatgtgggaattcctttagccaatgctccagcctcatacatcaccaaaaatgtcataacacatagaggcctcatgaatgcagcaaatgtggaagcgccttcaactcaagatctatcatcatttagctcctgaaagtccacacttaagtagagccttagacctacagggaaagtgctgtctctgtagtattgtagcagtagagagcctttgtgagggagccatctgcctgaagttgaacctcattcttccttgtttctctggtagaaaccatctaccctctaccaccttgcacagtgggcactggtcactcctatgtgctaagacaaggcagacatctgtgtgttctcttaagtctttggaggaaatcttgagcagtctaagcctttagagaaaattcattcttttttctgactgatcacagcatacgtgtgacccagtttgggtcaggagggcccagccttggttctgctggacacttatgtgcaaggattcccttcatgtaaattcttggtctcacatgacacttggtcattcttccagcctccatgtcaccacgtggtgaatggctgcctcacattgctccagtttgtgcactaataaaagccttatatttgaatctacctgtagtcttggggttctgtttactgtgtggggtggctgggagacagacttcaactctatatgaaggaatggatggcttttgtgggcctctgcaggaaagtaagatgacagagtaattctaattctggttttggtcatacttgctttgctacctaaaatctcctaggaaaaaatgcaaggttttggttattctaatttgtggcctggatccctattctttctgtgagactagaggtcatcctgaggagaggccagctgttatgacaagcatgtgtgcttcagggaataggacaattttattccattgtttccagaggatgtcatatgatgcccagtgctgctgagaagcttttcatggggttctataaggaggcatgccctgatatcaaacattccataggccgatgtcacgcagaagacaacgcgagtcacatgtgaactgtaattggtacagaaatacctgggtatttctgtactgtgtgtactgtagcaaactagttggaatgtgcctcttataaaagtacatttacaaatcttcccgtgactgtggctttgagcagtcataggacctagaaatctgtgtatgtccaatagctgaggttattttcagcaaaaataattaaagggttttattttttaattcttgttggttttctaggttgttcacctcaagtgcattgctgtagaggcagaaaaaggaggataaagataacagaagtcctataggccagggatgtattgatagctcttgtgatttccaccagtgttgctgttgtctcaaattgccacagccttcattgcttgccaacatttcctgcatggagggactcatggttgcccttccccaggcctgaagagagagtgcagtcaacatgagattgctaggcattctggtttctgaaagttgggtgatcagatactttattgtgaaacatgttttacaaactttcttgatgtgtaagtgacatgccatagtttacatccatttatggtgtataatttgaagagtttgtcatacaagcctgtgaaaccataatcatgatcatgaacatattcatgattcacctcttgctgttttacaatctctgcgtgtactttccaggccttcaggagtcctgtcatttactttccctacaggagaatagtttgtgttttctaggattttatgtgaattgaaacgtaaaatacttactccatttttcctgatgatgcacaattttttttttttttttgagatggagtctcagtctgtcaccaggctggagtgcagtggcatgatcttggctcactccaacctcctcctgggttccagcgattctcctgcctcagcctcctgagaagctaggactacaggcatgcactaccacgcccaactaatttttgtatttttagtagagatgtggttttaccatgtttgccaggatggtcttgatctcttgacctcgtgatccgcccgcctcagcctcccgaagtgctgggattacaggcgtaagccaccacaccagctgatgcacaattacttttaagatttatcaatattgcttatgtgaatagttcatttgtattgctgagaaatagtctgtggatatgtcacaatttggataaacagttggatgctttccagttttgggctgttgcaaataatgctactatgaacataggcatataactcttaatatgcagaaatgctttatttctcctgtgtcagtagtacagtgtacgtgaatgcgtcacttttaaagacaaggccagactataacctaactgtaccatttgcattctcatcaacagtatgtgaaccttcttatttctctacattcttgccatacttggtatggttagtctttttaattttagttgttttaatagctgtataatagcatctgtctgtgattttattgcatttttctggtattttatggtattgaacatttgaacatcttgtatctagttgccacctgtatatcctctttggaagaatgtttattaatgtcttttgcttatttttaaatggatgttggtgatactttttcattaataaatagacgtataacaaagacttatgttgaaactttactcattcttcagtaatgtgatgcacttatttgctaaatgataaaattgttttcaaatactgggaaaataatttctcagttttttggtctattcacagtgtaacaactacagacactatatacctgaaacactaccttcattgacaaattctccatcactttcttaggtctaaccattcaatgaaacaaataagccctggtttttaatatttgccaatttccctggtaaaatactcccaccatggccaattacaaggtgtcaaaataatgtcactgaacatgaattgagaagaagtgggtagcgtcacaccactgtattctactttcaccatgccaatacagtagccgcagataacctgaagatcatgtatgtaggaaccatacagcctgtggtgtggcaagactgatgccatcttgaagtgaagctgtcatggtcacctatgttctgaagcagtagcatagatatcatcaaaatgcttctctcccccaatggtcatgagtcttggcaagaaagtctgaagacgtgaagagctgcacgttttaccctaaaaactccaggccgggcgtgttggctcttgcctgtaatcccaacactttgggaggccaaggtgggcagatcacgaggtcaggagatggagaccatcctggctaacatggtgaaaccccatctctactaaaaatagaaaaattagccggttgtggtggcttacgggtgcctgtaatcccagctacttgggaggctgaggcaggagaatcacttgaatccaggaggtggaggttgcagtgagccgagatcacgccattgcactccagcctggcaacagagcaagactccgtctagaaaaacaaacaaacaaaaaactccagccttgttgaccactacaaaaagggtcctataaaggatgtaaaggaaactgccttctggagggcagatacagggatccattgtctcacagctgcacaagacatcacttctgttcatgagtccctatgaaatgtttctgaaaacaatttggcctcttcctccttctttggcctttcagcttcgttggcctttgggatagattttcatacacctgctcactatagaacaatgtatatataagagtaaaacagtaaaatgattaagaattgacttttgagtatttattacttgtgtttttaaaagtggcttaagtgaaatctagttgtcttaaattctgcatatttaaagtatacaatttctattttaatatatactcgaaaccataagtttccacctgccctttttagtccatccctcttaacaagtaatgggtacaaaaacttatttttcctcttctaatggatattttcaagtatatacacaaatggaaaggactgtgttcagatgcactatgaaacctttctaaatcttccattattacttatcatttagtagccattcttgtttcaactcttttcacacataattattttacttacaattcccacatcttgtcattcaatgctgcacctcttcagaatgcattttcaagcataagagctctttcataattcctataactttatcaatcattatttaaggcatcataaaatatatcatcagtgctcagtcacctcgaattgtctccaaaattgatttttaagacaaattcattgcaatcagatccaaaatgaatctatatggctattagtagtttcatctggtgagtctataataatacacagctaccactttttattattattcttgaagttgatgagacatttgtccagaatttgccacattctggaatggtgcgtgtttttgttttgtgtctctctgatgtcatttaacatgctgaccctttctccatattcctgtgcactagatattaaggaaatgggtaactgaactctggtcctgcagataggtgtgcaatagtaacacacttatgcagtgtgactgtgttgtgtgtatgtgtatgtctattcaaaaggtgacattcacagacatctggaggcttagagattattgaaaaagtaaaaaaggaagaagcactttgtttttgcttcctctaagatacctgagaaggtttctcaactgatttgaaatgtgaaacaatgccaaaacaattaccatagatccagtaatactgcttcttggttttactgaaatgagttaaacatttatgtccacacaaaatcttgtacatgaatatttatagcacctttgttcataattggcaaaatttggtagcaaccaaaatgtccttcagtaagtgaacaggtaagtgtggtacatttagaaaatggtatatttatccacattaaaataaataataaaagatatggaagaacttaaatacatatttctaagtgaaaggatctgatatggtttggctgtgtccccactcaaatctcatcttgaattataagtaccacatgtcatgggaggaacccagtgggaggtgattgaattataggagtgggtttttcccacgctgttctcatgacagtaaattagtctcacgagatctgatggctttaaaatcgggagtttagctgcacaagcttattctctttgcctgctgccatccacctaggacgtgacttgctcctccttgccttctgcaataattgtgaggcttccccagccacgtggaattgtgagttctccattaaaccgctttcctttgtaaattgcccagtctcgggtatgtctttatcagcagcgcgaaaacggactattacaggatccaaactaaaaggactacatactgtgatttgaactatatgacattccagaaaaagcaaaactatggagacagtaaaaaatgagtggttgccaggggtttgggggaagggaggaagggatgaacaggtggagcacggaggacttttagggcagtgaaactactctgtgatactaccgtggtgtgtatacaagtcactatgcctttgtcaaaacccatataacaaccagctagagtaaatcctaatgtaaactatggatttgggatgataatgatatgccagcgtaccatcaattgtaacaaatatactattctagtggggaatatttatagtggagtggctgtacatgcatgggacaagggatatgtggaagctctataattttttgctcaattttcctatgaaccaaaactgctctaaaaaataatctattaaaactttaccagcctgagcaacatggcgagaccccgtgcctacaaaaaatcaaaaaattatcagggcatggtggtgcaggtgcatgtctgttaccagctattctggaggctgaggtgggagtattgcttgagcccaggaattcaaagctacagtgagctctgattgtgccactgcactccagcctggatgacagagtgagaccctgtctctaaaaaaattaaaattaactaatttgcaaattagtttaaaatatgtattttgcaatgtttgtgctgtgtatttgtataactcaagggagattaattttaacaaattgaatttggcaagccagttatttccatgagcagcctagttaatttatctacttaaacaacaaaaacaagtagatacacagattttctggcactttccaagctcactatttccctactttgactattggcctaagaaattgccataagagctgtgtgtacctgtagccccagctacttgggaggctgaggcggaaggatcacttgagaccaggagttttaaaccagcctgggcaacatagcaagaaccctgtctgtaaaaaaaaaatatatatatattttaaaaattagctgggcacagtagtgagtgcctgcaatcccatatactcaggaagctgacacagaaatgtcgctgaagccgaagagtttgaggctgcagtaatctatgatcctgccactgcactccagcctgggcaacagagcaagactcttcctcaaaaaaaaaaaattaccattagacactcaaatatgcaggcaaaatgagtcctttgtggagtcactcagaagggctccccacttacctttctatatgaaatcatgctggagccacaccttctccctttccttttcagacaggacttaaattcagcaactgaagagctatctgctctatgtgtcttcagggtaaacatttccagagccaagccaaatgtacttatagacttatatatgactgcactaaaaaaagcaaagtaagtctatgttcagttcaattaattatgttcaatattctttttttttttctctctactgagatggagtctcactctgtcaccaggcaggagtgcagtggtgtgatctcggctcactgcaacctccacctcctgggttcaagcgcttctcctgcctcagcctcccaagtagctgggactacaggcgcacgccaccacacccagctaatttttgtatttttagtagagacagggcttcaccatgttggccaggctggtcttgatctcttgacctcatgagccacctgccttggcctcctaaagtgctgggattacaggcatgagccaccgcgcttggcctagccacaagattattaatagttgtgacgtataatgttttgtgtcgacttgcctgcattaagggctacccaaatagttgggaaaaccttagtacaggatatgtctgtgagaatgtttatggaagatattagcagttgagtctgtagacaatgtaaaggagatctggcctcatcagtgttaggggccaacatccaatgctttgagagccaagatagaacaaaaaggcagagaaagagcaagttactctcttcttgccctggatcatccaccttctgttttccaacattaaagttcttggatcttgggcctttggactctggaacatacaagaatgaccctcacccagttctcaggccttcagcctccaactgggaatttcaccataggctcccttggttttcaggccttcagatgcagactgaatgataccacccaccttcgtgtcttaccaggttgcaaaaggtatatcctgggacttcttagcctccataactggatgagccaagtcccataataaatcccctcttgtacatctatgtatcctattggttctgtgtttctctggagaatcctgactaatacaataggtttcagtaattttcatttcacaactgtttttctaagatgatctcaactccccatgcaagcactgtccctgcagtaacagtatcaatgatcaaaatttcccatcaaagagatgaaagctaggtgtcccaaacctttattctggtattctgatgtcccctttgcacaagtgctctgactgtgaacactacagacactgttctactttaaaatggcatatgctaagtggctcttctgtttagaaagttgctacaatcctaaaagaagcatatctaagaatatggaggaagaaatattatatgaatacaacactgttccttacagggctagacacactcaccgattacacaggcaggagaggcattttctgtgagacaaaattcctctttcgtcctccagcttcggtgcgatctaacggatgttttatcattcctgtcatggcgctatgtaaactctatttcccttattccttactgagcataatgaaactcacaaagctgactctaacgttctactttacataaatgtgtggagaaagaaggtaatgtttactaggctctcgccaagggtagaggcattttgtatctgaataactctgactacctaggtgactagttgtacacaataccctccaaaaatctctgtatggtaccttaaaaaagcagcgaagctcctcccttgtccaaggaggctggagacaccacctctcagccttcccctccacctttctccatagcaacggggtcattcctccctgaggtccaggagaagggcgacctctgccagcccaagaagcggtgagaactacattacccagaggcccgtgagccaggttcttggcgtggagccaatgaggctcaggggagggacatttccgctctgtccaacttgtcggagcggaacttccggcgtcctccctgtggcgggcactttggcttgtgtcagttccatccgcgggtgccggatctggacctaggtgctgacagcgagaaggcgcgaggagagtcgttttctcagctgcacagccggggcctgacggtcgccggcggtggtgacagctttgctcttgtctccgcccggatcgtccaccgctcccggcccgctccgcccagagtccgatggcggcggcactgagggccccgacccaggtgagcgctgcgtcctcccggcctcctctgccctccccacccgaaactgagggacgcgtgaagggttttctgcagcccggaccgcactgtccggcacagtgaggcgctggtgctggatctcgtttctggtagtgtggcagggagcgggagagcgacacggtcagggggctgcgcgggcaacagcttggagctgcgcctgagccgggaggctggggagacccaggccggcctcacgcgtgcaggtagcagagggtggggcagcgccgcgctgcattggccccactgagtttcaccagcacactgagggccacagcgcgtaggacagaagaggggcacggccccagtcacgcttctaaaagtttcacaaaagctgttcagaggaacgcgctggaagggcagtgatgatagcaggcatggagggacctagtctttttacgaggtcacaaagctggtaaaagtcagcaccaaggactgacacccagatacaaagcagtcatccctggacacctggctctggtgttccacattggaaccagaagtccatggagccacactttggtcacctgcctctcagaacatgtttcctcccacagattgccactagtacttacaggtccgtaagaagcacttgaagaccctacaagggtaagtggaggaaatccagaagctcattgattccagcaatgggatctctaggattgggactgtggtgacctgggattctttacttaccgcttttccaggccttgagcctagggactctgaacaaaaatatgtccagggtgagtattatatgaggtggtgcctgttgctggcaaataataggatgaatgtggaagtttgtcccagagataagtacaggtgtttggagctgcttggaggtgaggctgagctggttaagagaacctcaagtctcatttccttctcatgggaacagagagcagaggtacaggagttagaaactaaatggctgtctcagatgtctttgttctggagatgatggcagcaatgaagatttggagcagaagagggaggtgatcttccccaggcctcatgaggctcctgtggctgagcacagacaacagactgtgggtttaagggagttggtagcaataccaaagaggaaagaggagactactgcaatagtccaggtgagtgtagatgatgtgggccagagtagtggccacagtgtggcagaaatggttgaattttggattgtaggtcggctctgattttctggtattgggactgagagataagaaggggtgactcaaggctttttgagtttagtagctggaagcatagaagctccatctactgggagagccaagtagatagtagaattgtttttcactcaggacatcaggaatgtgttttgtccatgttaaaaatatgagatgttttagagaataagtaagtagctatatcaagtggctaggtggacacacaggtcttggactctgaggaagggtgcaggatagagacttctacaaagagtggaggatattattgaactaggatggagccctatgtctgttaggccatttgcattactataaagaaatacctaaggctgggtagtttataaagaaacaaggtttattacagcttatagttctgcaggctgtacaggaagcttagcgctagtctccacttctggtgagggcctcaggaagcttccaatcattgcagaaggcaaaaagggagccagcaaggcaggagggaggcaccagtctctttttagcaaccaggtctcatgtgaacttattactgttggaaggatactatgccattcatgagggatccacctccatgacccagataacctcccactaggccccacttccaacattggggatcacatttccaggtgagatttgaaggggacaaatatccaggctatatcagtgtcttaccttgggttgataatgaaataacctatattggtggcttaaacaacaaaaatttgtttctcacagttctgcaggctaggaaattctacatcagggtgcctctagattcacttatttgtgatgggctgcttcttgacttgcagtggctgccctcttgctttttcctcacatggcctttcctgggagggagtatgtaaagaaagcaaggaatctctttctttctattcttacaaaagcattaattccatcatgagggccccactcttttgaccttatctaaatctaattaccacccaaagattccatctccaaatactatcacattatattaggcttcattgtgttagtgcttcaatgtaagcattttgtgggtgggcgtggggcagaaacattaagcccataacatcatagatcccatttagtagtgggattcctggtcatgatgataatattaatagcaggccaggaaggggaagggtgggagccacaagagggtaccatacttgggtatctggatggatgttgtggaaatcacaaatacaggttatagagggaagcagccctaggaataatacagagagaggataccaggcaggtggccaagggttatgaaggatgagtgaatataagatggatgtggaggctgcattagtccattttcgtgctgctgataaagacatacctgagactgggaagaaaaagagggttaatggacttgcagttccacatggctggggaggcctcacaatcatggtggaaggcaaggaagagcaagtcacatcttacatggatggcagcaggcaaaaagagagtttgtgcaggggaactcctctttttaaaaccatcagttcttctttttttgagatggagtcttgctctgttccccaggctggagggcagtggtgagatctcagctccctacagcctccacctcccagactcaagggattctcctgtctcagcctcccaagtagctgggattacaggcatccaccaccacacccagctaattttcgtatttttagtagagacggggtttcaccacattggccaggctggtctcaagctcctgatcaagtgatccacccgccttggcctcccaaagtgctgggattagaggcgtgagccactgcaaccagccttaaaaccatcagttctcgtgagacttattcactattgcgagaacagcacaagaaagacccacccccatgattcaggtacctcctactggatccctcccatgacacatgggaattgtgggagttacaattcaagatgagatttgggtggagacacagccaaaccatattagagacataatgggatttcagacaagatgaggctgaagccagacctaatgctttactgctatatagcctcaccaggatcttatgactggctcctatgcctagggagtttcatgcaggctggtggatcagtttaggggcagaagtagtcatctgggagcatcacttaaccttgggtggagggccaccaggcaaggttttgaatgaagggtagcaagacagttactgttactgttactgtttagtgcagttactgtttagtgcagtacaagttggaaagggccatgtgtatctgagatatgtatgtggttctgggtggctgaggttgatgaaaggagtagactcaggtaggaagggcttcagagcaggatatggggctgcctgtggcagtagggaccatcataggtctgggtagtcctggaacttgtttgaatttgcaagcactttctagatgtcttgtgctgagtaacatataggaaggcaggagagatgcctgtgttgtgggatcggggtggaggtggctgagggagtgagttgggtaagagaggtgtggtggaaagagtgatgcacatatgaagacggagtgtgagcttttgtttcatgagtctggacattgaggacatgagggtgaaatgtgaacccagaccttcagttgtgtttgggagccatggtctgagggattccaggagaatttatagacacaagaatgtggtttctatctgtccacctgcctgttgttgctgtgggagaacacagtgaccaatgagaccatgagagagtaggcatcagtggcatcagggcctgttgtattcgctgaggtggggagatggggaggagggtgagccagggatggatgtttgggggaatcaacttggggtcctaggaaagatgctgaccatggaatgaactgtccccatcatagcaggtttttgtagcctttgaggatgtggccatttacttctcccaggaggagtgggagctccttgatgagatgcagaggctcctgtaccgcgatgtgatgctggagaactttgcagttatggcatccctaggtaaggccctcctattcctcccagtttcctttgtgggtctctccttttcccctgtccctgaggcagctctgtcctttcttcagttagaccctgagctctacagaccttcccactttcttggcatatgtattctgagggacatcgccaagcaaggcactctcagactgtcctaacacctgtttcctctaggtatgcagtgaagggtctgggagacaggatctttctttcaacctaaaggatttgtccttgccttctccatgacaggatggctttctccagttctaggatgctctttgttccatgttctgccttttgcttctaactaaaatctcaagctgcctgtttcaggaattgcaggtatcatcatgttaactacttaactggtccataggcttttcataaagatccacctgaaagattttcttgtaacattatttttcactgctgtagtttgtcatgtgctgagttgctctgtgccagtgctggctgtgcacctctctggtcttccctttagggcatacatcttataggtctggtatagttgcacaactgggattcgaggatggctctggttgctttacagggtgcaaacagcaagatagtctcagaggaggcctggccctaatgagtgacaactaagggagggcaagacactagggctgtttctaatcacaccataaacctgtcctgagttctcagtgattgggtgctgattccataggacatatatcatttctctcttttttttcttttctacacatgttctgatttttatttcatccatgacttccagcccttagctgctaccaatttctggcctccatgtgtcacctgttcctttccagtgcaacttctagagtgttctctaacactgacccacatgtaatatgttgtcagatgtgcacatgtttttaaatagtccttccacacctagtattcagttcccatgggtgtctactgggcctggacaccaataatcttctgtgcagtgtaccgaagtcctctcttctcatcaggggaggaagtcctgataaaagcttttggcagaatagtgagtcagagaccctacctgttctctctgagttgtgccccatctttgtgtctttcatctcataaggcctcccttgttctgtgacttgtagaggcttttttccacaaatttccaccagctctcatatcctaaaaacattttcttagactcattctttgacacacatttttgatgtaacttctcacaccatagtaaatctgtgttttctcagcatttctcttctttcaggttgctggtgtggagcagtagatgaggggacgccttctgcagagagcgtttctgtggaagaactgtcacagggcaggactccaaaggcagatacatccactgataagagtcacccctgtgagatttgtaccccagtcctgagagacattttacaaatgattgagctccatgcctcaccctgtggacagaaattgtacttgggtggagcatcaagagatttctggatgagttcaaaccttcaccagctccagaagcttgataatggagagaagctctttaaagtggatggggaccaggcctcatttatgatgaactgcaggttccatgtgtcaggaaaacccttcacgtttggggaagtcgggagggacttttcagccacctcaggacttctccagcatcaggtgactcccaccattgagagaccacacagcaggattagacacttgagagttcccactggacgaaagcctctcaaatacactgaatccaggaaatcttttagagagaaatctgtattcattcaacaccaaagagctgactctggagaaaggccttacaagtgcagtgaatgtgggaaatcctttagtcaaagttctggctttcttcgacacaggaaagcacacggtagaacaaggactcatgaatgtagtgaatgtgggaaatcatttagtcgcaaaactcacctaactcaacaccaaagagttcacactggagaaaggccttatgactgcagtgaatgtggcaaatcctttcgccaggtatctgtcctcattcaacatcaacgagttcacactggagaaaggccttatgagtgcagtgaatgtgggaaatcttttagccacagcactaacctctatcgtcacaggagtgcccacactagcacaaggccttatgagtgcagtgaatgtggaaaatcctttagccatagcactaacctctttcgacactggagagttcacactggagtaaggccttatgagtgtagtgaatgtgggaaagcatttagttgcaatatctaccttattcaccaccaaagatttcacactggagaaagaccttatgtgtgcagtgaatgtgggaaatcatttggccagaaatctgtcctcattcaacaccaaagagttcacactggagaaaggccttatgagtgcagtgaatgtgggaaagtttttagccaaagctctggcctctttcgacacagaagagctcacactaaaacaaagccttatgagtgcagtgaatgtgaaaaatcatttagttgcaaaactgacctcattcgacaccagacagttcacactggagaaaggccttatgagtgcagtgtatgtgggaaatcttttatccgaaaaacccacctcattcgacaccagactgttcacactaatgaaaggccttatgagtgcgatgaatgtgggaaatcctatagccaaagctctgccctccttcagcataggagagttcacactggagaaaggccttatgagtgcagagaatgtgggaaatcttttacccgcaaaaatcacctcattcaacacaagacagttcacactggagaaaggccttatgaatgcagtgaatgtggaaaatcctttagccaaagctctggcctcttaagacacagaagagttcatgtgcagtgaatgtgggaaattattttgtcacttttttttttttttttgagatggaattttgctcgtcacccaggctggagtgcaattgtgcaatctcagctcactgcaacctccgcctcctgggatcaagtgattctcctgccacagcctcctgagtacctgagattacaggcacccaccaccatgcccagctaatttttgtatttttaatagaaacaaggtttcaccatgttggtcaggctggtgttgaactcctgacctcaggtaatccacctgcttcagcctaccaaagtgctgggattacaggcgtgagccaccatgtccggcttgtgttgtgacatttaacacaagatttcccaaagaagaaaggccttatatatgctgtgaatgtgtttttgcttgttagtttgttttaacttggtatgacggcactggaggctagcctttgagaagagccttctctgatgtgactcatgtatccaaacatccatggatttcccataaatttgaggtatgtgggaagcatgtgtagctatgttgtactctctaaacctgcccagggaccttaccagattcgtgtcactgccagtttctgcggctgaagccttttcatcactacccgctgggagacccacagagtgtgcatcagtcaccaccccaacatgctcagggaggcagagttcttccattagttggaggaaagcacgagtagtctaagctcttaggggggtttctcatttcctcctgtggctacatagtgcatataactaccccagtgttggccccaggacctgatctgagttctgctggcagcttccagaggattgccttttttgaggacattgttgatctcaggcgatgcttgtgatgaagcattttttagcttccaccacttaccaggaactgcctgttaactggcttgtgcaatgataaaggccttttgtttaagtacctttaatcttgtaagttgtattaattgttgagtagtttggaaacataataggactctgtcagcttaaaagggtatataacatttgtggggattcaaattttgtttgcctcagaggggacagtatgctcacagaatatagattttgctccatttttggcctatttcgcattgtttccaaggccttctaggagacactgcagggctttctggctctgatttttgcctgcatgtgggctcagaggtcattctgcagagggggcagttgtggcaacttccattgtttctggagacaacacaaagtttttcttgttgagtgaggatatcacataatgccctgcaatgtttagaatcccttaatgaggtcctgtgaaggagctgtgtcccttgaaacacagaattcagtgagctagtgtccctagctataaaaccatggggctggagcgaaacataattggtaaagaaacgctgggttgaataatagggaatggaggagactgcagcaaattagatggactgttcctcatataaagtttcatccggccgggcgcagtggctcacacctttaatcctagcactttgggaggctgaggtgggtggatcacaaggtcgggagttcaataacagcctggccaaggtggtgaaaccctggaaggctgaggcagataattgcttgaacttgggaggcagaggttgcagtgagctcagatcacaccactgcactccagcctgggtgacagagcgagactgcgtctcaaaaaaaaaaaaaaaaagatccattcaggccagtcacagtggctcatgcgtgtaatccctacactttccgaggccatggcgtgcagatcacttgaggtcaggagtcagagaccagactggccaacatggtgaaaccccatctctactgaaaatacaaaaattaaccaggtgcagtggtgcacgtctataatcccagctgctctgaaggctgacgcaccaagaatagcttgaacccggaagtggaggttgcagtgagctgagaccacaccactgcactccagcccgggtgatggagtgagactctgtttccaaaaaaaaaaaggctgggcgtggtggctcacgcctgtaatcccagcactttaggaggccgaggtgggtggataacccaaggtcaggagttcgagaccagcctggtcaacatggcgaaaccctgtctctactaaaagtacaaaaattgtaaaagtaaaaagtaaaagtaaaagctgggtgtggtggcaggcaccagtaatcctagctactcaggagacaggcagaagaatctcttgaacctgggaggtgagccgagatcgcaccattgcacttcggcctgggcaacaacagcgaaactctgtctcaaaaaaaaagtatccacaaatgttccagtgactatgactgcaagatcactgtgtgcagaaatctctagaaatgtgtgtcttgtagctcaagttattactagagacaacaagggttttgtggattcctgtagcctctctggcctgtttacttcaaggccattgctgcacagacaaaaaaaaaaaaggatgaagtcaagagagattcggttgtccttggtgcggcttttgtgatccagtagcaatcctcttaacgctgatggaaatggccttcattgctcacctgtatttcctgccactgaagcaggtctgcctctacgtggcctggggagctagatggtagagtcaatagagacttagtaaaccagactttttgaagtgtcaatgaccaagattgttattgcatccattaaaaaaaaatcaagttataattgatgtggaataaattatatatatttaaagtgtacaacttgataagttctgacataaatgtaaacccatggaagcattgttgtaatcataagaatgagcatatctcacctgcatattttacttttgctcttttataatacattccagaatatgcaggcaacttttaacattcctttacaattgattgacttgaattttctggaattttattttagacatcataaagtgtgtatttttttgtgcttttatttataaaacttccccttaggtaagggcctgaggttaactttggaggtgacagatatgtccaacaccattgatagggtgatgatttcaaaagtgtacatatgtgtgtgtgtgtgtgtgtgtgtgtgtgtgtgtgtgtatacttactgttttaatatgtgcagtacattgcatgttgattacacctcaatgaacctataaaaagttattccatttaaaaatctgggcctcccacttctattggaaactggacaacttgacagcctgcagtgttttgaaacagcatggattgggtgtcttgtttccagcatatgtcccatgttccccaacactgttcctcaggaaacagggaggaacagctgttcctcaggacctgctgagtggccatattccctgaaggccagaaaagtaacaaggtgaccgttttggacaaaattctgagcttaaaaccttgcctgaatcagtagcccccaaattcattgtgcacatcttataatttccaagaacacacatattaagtgaatatttttatgtttataattgtgaaatggtctgttcagggctgtcattcctcaaccttttttttcaaccaccctctcattaaggaagcatatgtattaatcatggtttctgttttttgtattatatgtcttgacatcttaaaattcttgctggtgacagagagacttaccctaccagaggtagctaatttctaaaaatagtaaacaactaccttgagagcaaggcaagccaactaccctctttatctaactcttactcaccaagccaatactttccctgcactaaatcatcccagcgttactgccagtgattttgcagcagtctgcagcaattttggtccttgcctcctcagaagaaaattcaaccgaggaggcagaggttggcttaaggcacaggaagagaccaaggcaagttttttttagcaggagtgagagtttattaaaatgttttagagtaggagtgaaaggaatcaaagtacacttggaaaagggccaagtggataacttgagaggtcaagtgccccacttgatccttggcttgggactttatacatttgcttatttcccaggctctttattctccttccttcggtaggctgttgcttgactactgcatgcacagtggtctgccagtacttgggaggggccgcatgcagtttgtttactgaagtcatacatatactcatttggggtgatcttcccttaacaagtcatgcacccccagaggaaggtcaaataccagtcaaattttgccatcttgccccattttgtgcatgctcgaaaccttatcaggggttgtggttcactggctccaggtgttttctatctgttggaaaactcttttccctcctggtaccaatcatggccacttatcatctcagagggatagttttatgctttcctgtccttcacccaatgagagctggacatctcgggggtccctctcttgttttgtttattatctcagaggaaaagatttatgattgcctgtccttgactccaaaattgcctgacattcctggggtccctctctcctgccctactcttatctacctactctaacaccagggtgagggtatgaggcaactagagaccacccctgtaaatcgaagccaaccagaattattcagactagccagtactcagctgtttgctctgatctggcctaggctttcccctagctcttgcttcttcctttagactgaaacctgttcctcctgtggccctgcatggcatactgtacttcccatttctagggaaattctgagtaacattaaacttttatttcactggcattgagctctccatgtccttttccaataaagacccatccacaaattggcctctcttggctatgtaatattacatatctttccagcacttctcaatgccttcaccttctcttttctccattatgcctgccacattctaacattccatataatttagcatttttttcatatttcctcctctttcttgagtacagcgtaagctattggggtctgtctcttgttttgtaaatgtcccatgcagttaagatagtgtctgaaatacagtaggtgttccttgaatatttcttagaactatgaataagcataatactacagcatccctgttcaccttaatattctgatagcactttctaaatgttttctttacttctccttccaggtattattgagtgttttcaagaatgaaaagaggcctggcatggtggctcacatctgtaatcccaactttttgggaggctgaggtgggaggatcccttgagcccaagagtttgaggctgcagcaagctatgatcgtgccactacactccagcctgtgcaacacagtgagatcctgtctccaaaattaaataaataaataaaattacattttggagactaaacgctgcttgtagtcatagttctaacacagctgtgtgctcagcttcatttgctcacttctcagaattcaatgtctcctgctcaaattttgctgtcatcttaaccgttttcacttatcacagatatgtttctccaggtccatttcgtcatgtatctgtgaataactacagaattattaactttgagtaatttggccgggcgcgggggctctcctgtaatcccagcactttgggaggctgaggcgggcagatcacgaggtcaggagatcgagaccatcctggctaacacggtgaaaccccatctctactaaaaatacaaaaagttagccgggcatggtggcaggcgcctgtaatcccagctactccggaggctgaggcaggagaatagtgtgaacctgggaggcggagcctgcagtgagctatggtcgcaccactgcactccagcctgggcgactgagcaagactccgtctcaaaaaaaaaaaacacaaaacaacttttgagtaatttaaacaattcacaaatgtttttgtctttctttccccatacactcgcccttttcttttttaaaaccataaataaatctcaattctcaattcagacactgtcggtgtaattgcaggtgaaatgagaatcacctcccagccaagaaatctgatcccaattttccaaatctttatttctgggttcagacaccacattttcagcccctgtcttggcatataaaagcatttataatggttcttcttttcagataagaaacatcaccaaaaggaaatagatatatctcaacttttgggctaggaactctcatttggataaaagaatatttctcctttggttggacattagtgaccatacaggcaggaaaggtgccttccttgaccaccttctctcgcctgtcttcctcctcatggttctctcaggtattttttttctgaggaaaccagaggaagagctctatattagtccacttgcctcagggagctccagcatccctccatagccactgtctggagaccattcttccactccatggccctgcctggggacaattctctgttaactctgacccaactgaggctcacaaaactgactcaaagcttccctctacagtacacatattttttaaatgaaggaaatttgactgaactatgagtggactcagagtgacattggatgttgtgtgtccatttggtggtgtggcttcagggaacatctgtaagaatatatcccaatatttcggggatccctgcagacctcactacacaagacctggttgagggtcctttaaaaggagcgaagccacgccctgacctcagagtctcagggcataatttctcagcgcccctcgcagtaccatttggcctttgcccagcgtgcaggggagttagccgtcaccacggccaagtgcacatgagaactgcattgcccagaaacctgtgcgccgcccggcggcggcactcttaggggcgtctccctgcggacggaagctctctgggcgggacttccggtatcttcctcgcggtggacatcttgtcggctcttaggtggaaccatcggagcagaagctcggggttgctgggcggttccgaggtgacggaagcgggagggtgcgggagaagtcgctgttcgctctgcggagtggctcgccagcgaagaccccgcctgcgcccccggggacggacgaccgcggtgccagggtcccgcgacctgggaccccctcgcggctccgggtggtctacgaactgtgatggcggcggccgcggtgatgggcccggcgcaggtgggtgctgcctttcccagactttcgcccgccccaaatcctgaagttccaaatgaggagcgcctgtctgagtccctgcagcgcaggccccagtgtccaaggcagcggggcgctggtgggtgggggcgagtgtgactggcagaggggcagcctgagcataggtttggagctggactgagcccgtagcagtcgggagcgtgtgtgaaccgtagtcaggcctgcaatgtcgaggggagaagttgctccttcattgcgaggacgataggagccatggcgggttttgaatggtggagggaagggatccgaaaaaggatttttaaagtattccaatgtttgctgaggaggaaaccgactacagtgaggtagaaacgatgaggatggaggcaaggagacgtttgaggaggtccctgcaacaaactccagaagtgttgcggtggtggctgggccagagcagtggcaggaggggttgggtggggaagtcatgagattctgggtagatttttaaagatggaaccaatggggtttcctgccgcatcagatgtggtcgtgagtgaatgtagggaggaaagggctatccagggtttttttggcctgttttccttcctgaacgtgtgaaagaatggaaattggtaagtcacagcagggagcacgtttcaggggcatcaggaattgggttttggacttggtgaatctaaggtgttctgcactggaggttcatcacgggtagctgaacatgcaggtctggggttctagagagggagttgtgctagagacttcaatgggtgaggcataaggtcaaagcctgtagtagatcagatttagagggtggaatttcaaggaagttattttgtgtggtctctgaagtgagaggtgggtttagggtggaaggccagggatgaaggggtggacacttaagattccttccagaaaggaggggtcctggcatgtgaaagcattctagatggtgttgttggaagtcaatgcttggtgctgcaaagtgaaaccagcactcaggcaaaagttttctcagcaaggcaatttacttctgtgcaagtgtgctgcctgtgttaatcacgatcccaagagcacactgaacaaaggagggaaggggtttttatctctaacccatagtccctaccttcctctgtgtcactcccccatgggctggggtcggaccgcttaatctaagctgagccaattgggtatttgtgagtattttccaaataaggaagagggaaggggaaggtgagttacagtggtgggacatgtgagttgtgtaggacgtgtggttttggcgggggcaatgggtgcaaagtgagtaagggaacagatgtgaattattggttagtgcttacaggaaggttgtttatagtaactaggggcaaggaggcatggagaacaagaaaggtttgagaacaaagaacaaggaagttaacaggctaaacctttgaagaggaattttattatatcttatagtgtcagcaagaggagagggctgtagagcataagtagcctggcctgcactggagaccaaggtgagggatgcagtaggtttgccaccctacaggctcagcatgccttcatgggcgctgcctgtggagcagtcccatccccaaccagtgcattggtgcctcagttacccaaaccctcaggtaagcagaattgatgaacatctctaatgaaggatcactgcagctccccttcagaggaatatgtatcaggtaggctggtttagtgcaagggctagtgtacaccttgcaagtacgcagaaggaactaaaaaatgtatgtacaaagtaagggaaatttatactagcacttaatgattggtcaaaatattaagttgccttgaagtattttattacaatggaaaaatcttaaccaaattttcttaaaagctttaaagcaggcaaaacaaacctaatttttcaaaaactcatcagttcatttgcatggatagtagtagctgtttcaaaggcacttgagatgtacagacaagcctgatacaaacagtagccctatgaggtgggtgccattattatccccacttttaagatgaggacactcagacgctggtctttatgttcacacagctggtgggagccagcactgagatctgagtatctgaagttagagaggtaacccaaaatcattcctgccaaagggcagggtaggcagggcttagggaaacagttcagtcgatgagatcccactgtgggaacctgccactcccagcttccctcctcttgtgaggttgccatggtggcagaaacttatgattcctacctagatgagagtagattgtctcaggccctcacttagcccaacacacccccattatctcagcaactcagtgtggagaatgatagtgttctgggactcttcagtgtcccttctgcctaccgttcttggaggtcctgcagtcacccaaagctctgtgttgtaaattctgttttggaattatgtggaagggtttctatttctggcaagcaatgggatgaaatgtggaacattatctcaggcataggaaccagcatgtgcaaatacttaacttaaggctaaactaggagtgttcagggaacctcaggcctccattatgtctggtgggatcagacagcagggacaggattcagcccagaaatggcagcctgaggatctgggtttgtatgctgagagaattgggagccactgcaggtttggagctaggagggagtgatctgactttggtcttaaccaacttcctctgtacagtgaaaaaagactgtgggagtgaggatgaaggaaggaataccactgaggagcttaatgcaacagttcaggttggaccagagtggtcgctgtagaggtgggagatgtggatggattctgaatcatttttcttaaagtgggaccaaccagattttctgatgtggaagatgagaaagaaaaggcaaggggtgaaggaagaccctggattttttagtctgagaagatataaagatgccatcaactgaagtgacaaagttggtggtaggagtacctttcagaggtaatatcaggagtgcagtttggctatgtggaatctaccatgttccaaagacacttgagtggaggtgtcaagtagacagctggacacagagatctgaagttcagagaagggattcaggttggagctatccacagggtggcagccagcatgtggatcaggatggagctttgcttccaatttagagagagaatctttaggtcatggtgacagtgccatcagcacactgtaagggcagacacagcagggtagaggtaggggccatcttagagtctagaagagggagggaaatgtccctgggaggaaggggaataatagggtcaggcaggtggcaaagcgttccaggcagagagtggatgtgaggtgaagtactgtagtaatagaagtgaggtggcagtgaggccagagccagtgcttattcagctctttatgtgctcctcaggcttccatggtgacctttggtgggacctgtggagtttcagtcaagctagtgaattagcccagggacagattgggtcagtaggcagaatccctgtgcttggggtaggtgcccagtgagtgtaggttttgaatgagttaaatgttgagaagcctgtgactgacctcagtagtacaacaacaaagcagaaaagggctgagtttatctgggatctgcacatggttctggattgctgaattgacccatgaaatagagccaggaggggaagatttaataggtggattcagggcaacccatggcagtgtggccgttgatcaggaccagatgtaatcctggatgcattatccaagcattctctggatgctgtgtgcagatttgcatgtggggaagccatggaggtaccagtgttgtgggtgtccatagatgtaaaggaggtatagccaaaagggtgatgtgcacatggagatggagtgtgaattcatgagcccagagctttggtatggagggtttctgaaagaatgcttagctcaggtttgtgtatgaggaataatctgttgatccccagggagctggctgataggagaagggttgggtcctacataccaggcccatggtgttttatctgtccacttgcctgttctgagctggacaaaatgattaatggaatatgagtcgagaacaggcaccaatcacaccagggcctgttatctcatttgagttagatgtgacaaggagtcctggagagagaggctgtccttaagctcagttgtccacctcacacagggctatgtgaccttcaaggatttatttgtttacttctcttaggaggaatgggagctgctggatgaggctcagagactcttctattatgaaataatggcttctgtgcttcgcatttatagtctccctgggtaaggccccagtatcccatttttctgggctgggtcctactcttcctttttgccctaggggttgctctttcctttccatagctagagcatgggtactgctctcttctctgattccctcacataggtcccctgggtgcctaggctcagctagatgcattggcccctctcttccctgtgttcctcaactcctgctgccctgaagccttgccaggaagggtttggaggtcaggggtcctaaggtgacccagtgaattctgcttggcctctccctggccaggtgactgtccacactcatgacacctctggactccaggctccacccgcttcctctaattgtaatttccttgagtctgcctgtgtcctcaatttcagtcatcatggtcaccacttgtgggcccactgcactgttcctgcaggacaattttctgaggttcattttgtagcatttgttttcttgcaattttgcatgggtgggctactctggctagtgctctcagcctgtttcacctttcccctatgctttgtatcttccagatcctctgtggttgttgaattgtaacaagagagagaactctggctgcctgagagggcatgactctagtcacagcaggaggggcttggacaggccctggtgagtgggagctgagggacgccataacctcagggctgggttcctgtagttccggaaacctatgttgtgcccatcacaagtgccaaggccagaggccctaacttatttctacctttttatccccattctgtacactcttgtcatttctaatctgacttctgacccagggctgtcttctcccattctctaccagaggggctctagtagagcaatagctctctctgcgatgctttccaatattgtactacacttacactattgtgtcataagatgtgtgcatatctgtaaatagtccctgaacacgttacttatttttaatcacattttcctgggcctgtactcacatttcgcataggagtcacctgtcacccacagtcagccaaggtcctgctaaaagtcattgcagaggattaagttggagaccttgtactacaccccatcctcgtgtctttgtttcttgtgaggccatctccattctgtgactcttagattccagtactgtacagcagcccttttttcaacctgatcctagctctgttccaccaggaaacttaggtactcagtcctgggtacagcagacacatatttgtgatgtagttgccccacccaccaaagtcagcatgtacatcaatagtatttttctgccttcaggttgttggcatgaagtgaaggatgaagagtcatcttctgaacagagcatttctatagcagtgtcacatgttaatacttccaaggcaggtttgcccgcacagacggctctcccttgtgacatatgtggccccatcttgaaagatattttgcacctggatgaacaccagggtacacaccatggactgaaacttcacacatgtggggcatgtgggagacaattctggttcagtgcaaaccttcatcagtaccagaagtgttacagtatagagcaacccttaagaagggataaaagtgaggcctcaattgtgaagaactgcacagttagcaaagaacctcatccgtcagagaagccctttacgtgtaaggaggagcagaaaaacttccaggctactttgggtggctgccaacaaaaggccatccacagtaagaggaagacacacaggagcactgagagtggggatgcatttcatggtgaacaaatgcattacaagtgcagtgaatgtgggaaagctttcagccgcaaagacacacttgtccagcaccagagaattcatagtggagagaagccttatgagtgcagcgaatgtgggaaagccttcagccgcaaagctacacttgtccagcatcagagaatccatactggagaaaggccttatgaatgcagcgaatgtggaaaaaccttcagtcgaaaagacaaccttactcagcacaagagaatccacactggagaaatgccttataagtgcaatgaatgtgggaaatattttagccatcactccaatctaattgtacaccagagagttcacaatggagcaaggccttataagtgcagtgattgtgggaaagtcttcagacacaaatctacacttgttcagcatgagagtattcacactggagaaaatccttatgattgcagtgattgtgggaaatcctttggccacaaatacaccctcattaaacatcagcgaattcacactgagtcaaagccgtttgagtgcattgaatgcgggaaattctttagtcgaagttctgactatattgcacaccagagggttcacactggtgaaaggccttttgtgtgcagtaaatgtgggaaagactttatcagaacctcccaccttgttcgacaccaaagagttcacactggagaaaggccatatgagtgcagtgaatgtgggaaggcctacagcttaagctcccacctcaatcggcaccagaaagttcacactgcaggcaggctttaggagtgctttgaatacaacaggactcatcaatcagatgttgaatttcatgtatctgaacattgacacaaaggagataccttatggtgccaggtacgtgggaaccttctagggatatgttgcactttctgacttgctcaggttttttgccagagttatgtcactgtcaatccatgtggccgaaaccatcttaactctaccagctaagataccccagcattggggaaggcagggttttgtattgtccagtccctggagaaaatcatgaaatgcctgagttcattgggggtcctcattcccttctgtatgacaggtataggtatggatatgacccatttttagccaagagggtctgagctgtatctgctggtggcttatacaaaaagtttactttcttcatggatattcttggtctcacatacttgtaatcaagtttttccagcctccaagtcacctggcctgggaaagtacttgcctcatgttgctctggtttgtgataataaaggctttacagtttaagccacatttaatcttggggcttcttcttatggtctggggtggattgaaaacaggctctgccaaactgaagacagcctttgtgcggtgcctccaactttgcctcaaatgggacagtgggttgagggagaacagttcttagtccagttttgatgttaacttccatagctgacaaagcttgttaagtaagaattaagatcttgtgtagacctgatttgtctggattttagagttatttgagagcccatatttcaccttgaggagggtgctgctgctgtgacagcctgcagtgttttgaaacagcatggattgggtgtcttgtttgcagcatgtgtcccatgttccccaacactgttgagggaaagctgttcctcaggacctgctgagtggccatattccctgaaggcctgaatctgtttcacaggccactgttggtaagatctaaagcatccagtagggaaacaaaattgataaatattgagtgtgagtaattgggattggggagattgtggcaaactagaggggaagtgcccattgtaaaaacacatccacagacagtccaggcactaaggctgaatgggatcagggtatccagaaatctcaggatctccagggccatgttactgttaggtcaaggtcactggtgcagcaacgaatgtagtttttctagattcctctccctccctgggctctttacctaatgtctttgcggcacaggcggtaaccctgggagtaaagaggtgtggtccaaggaagtagcttttgtgaccagctggagtttctggtgactcttttggcaatggtcctcattgtttgccagtttttcttactactgaggaagagattgtcttcccaagatatttggagtgataagagtcaccatagtgaggtagagtcactcttagtgatgtccagttgtccagtttccaatagaagtgggagatccagatttttaaatgggataactttttataggttcactgaggtgtaatcaacatgcaatatattgcacatatttaaagtgtacgagttaagtcttgatacacacacacacacacacacacacacacacacacacacttgaaactatcaccctatcagtggtattggacatatctgttacccccaaagttaacctgaggcccttaacctttctctcagtgctcgccttcccccagaatccctaggcaaccactgagtagttttcactgtaggtaaatttgtcttttctagaattttatgtaagtctgcctataaagtgttaattttgcatgctgtctttcatgcaacataatttgaaatttgtccatggtatgtatgaacagtccattttaaaattactgagtcatattctgtatggatataccacagtttatccatttatcttaattgatgtctgtactccacccccatttttaaatattaaaaagctgctgcaaatattgatgcatgagtctttatgtggacacttagctgagaacatttttaagcagaggttttgaaggtgtgaccatatatcttactaattatagtaaaatatattggaaaagagatacatacagggaagaactgtgaaacagaaaagacctaagatttgatgatttgggaaattctcagcccatcttaattggaaaaaaaaaacaaaccattgaaattaagagattcattgttaggaaagatagatgttttagagagagagatgttttagagagatagccaaggatgtttgctgataccgggatcaaaacatacatcagaacactgtcacacaaaaagctctttgaagagattaaatgtgacttgtagatcccctcaatacaaacaatttataagaagtttaaactatcactcatctcagcaaaagccaaaaatatagataggggattccctaggaggaataatctgcataaacctcttttctaatgttgtgaatttcagtgatgtacaggagactcacaaaattcttgaaaattttataccagtggaaatgctcaccttgggtctaaagggaccttgaaagtatgaagttaaagggtgtaggcatgtaaagtgtgaagttaaaggttgtaatattctatacatgggactggctgcggaaacaggtgcaagcccttgctacctttcatgagaaaggaaggatgactcagagcagaggagagtccagtgggcagagtcctgaaccatgtgatattcccatgtcttgactcccagtggcatttgccaaactagatttcagattttcttgggattggtggttccattttttttgttttccccccttccatttcctccccttttgaaacaatgcatatacatataactattatcctaggtctttcccaaccttttgtttgggagcagataactagttttctagttttacagatccaaatgagacaggaatagcactgggtggtcacaggaggatggaaaatctcaacaccctggttttggtgcagctgaaaaaaaaaaagaaaaacccaaacaacagctaaaacgggaactaggcaaagaaaccgtgggataacagaaaacccaaaacaaaagagaaaactgccagaaccccagtcagggtgacatgtctgtaactcttccaggcaaacccaaataagggaggaggggtggtaatcaggggtccctgaaatcccctcttttcccagaatacctaatgattacccctattaaaggaacacccatacaattagaaacccaaactttgttttgcatgacttgctctcaggggcactcccacacttctctcttgtgtgtacttttgcttcacaataaaagctgcttgcctttgcttcactgtgactcgtcactgaattctttcaatggtgttaagaacctggatgctgctggggctgggatctcaccaacaatgtccagagacccccccgaaccccccagcaacacagagaagaattgtgccccaagatgggattatacctagagcctcatccatattggacttagacaatttagatgaaattggagactttagctcagtgtggaggcgcacacctgtagtcccagctgctcaggaggctaaggcaggagaatcgcttgaacccaggagacagaggtggcagtgagccaagattgcgccactgcactctagcctgggcaataaagcgagactgtctcaaaaaaaatcataaaatagtaaaaggcatcaaatttttgaggggaaatacctattggtgaactgaaaactcgacaacagttctggtgtgtgggataacatgttaatagccttgatcattttgaatttcataatcataaatgggattttgtttttgagatggggtttcactcttgttgcccaggctggagtgccatggcactatctcagctcactgcaacctctgcctcctgggttcaagcgattcttctgcctcagcctcctgagtagctgggattacaggcatgcaccaccacgcctggctcattttgtatttttagtagagacagggtttctccatgttggtcaggctggtcttgaacttctgacctcaggtgatccggctgccttgacctcccaaagtgccaggattacaggcatgagccactgtgcctggccttttgggattggtttaaagagctgtggaagacaattgagcaattaccacagagattagcaatggagttcctagtatatttgaaaatgaataaaattgttcctgggaaaattaacaatagtgatctcagtctaaattacagagtaagcaattcagagaggataatatgccacatatgcatagatttgtttaaaacagtaaattatatagcactgtaaaaattgaaaaaaatactattagaacaacaaacaattaggttgatgaagcacaataagagactaatgaaaaggaaagaaatgaaattacttaatatcaaaatgtatgaaataaatttaagccatatacaagcatgccaaattaacttgtgagattaacaaagagtgtattaattggggaaaaagactaggagtctgcaaatcctaagattaggcttaacactaagcctcttacaaacttcaagttttcaaaaaggctcaaggttttctggtacagaggtactatgggagcacagttcagatttaacttaacattacgttatttaggccaggcacggtggctcatgcctgtaatctcagcactttgggaggctgaggcgggcagatcacgaggtcaagagatggagaccatcatggctaccacagtgaaaccccatatctactaaaaatacaaaaaattagccgggtgtggtggcaggcgcctgtagtcccagctacccgggaggctgaggcaggagaatggcatgaacccgggaggcggagcttgtggtgagccgagatcacaccactgcactccagcctgggtgatagagcaagactccacctcaaaaaaaaaaaaaagaaagaaaattacagtctttaggaaactagatattcatcagagagtgtatgtgaccagaataagccatcttacgacgtctagatgacacagtaaatacttatgctgattcaaaattacctgagctacttcaacataggacatagcaaaacactgataattacattactgtatacttataaaagatgcttgtggctgggtgcagtggctcacacctataatcccagcccttcggaaggccaaggcaggcggatcatctgaggacaggagttccagaccagcctggccaacatggtgaaaccccatctctactaaaaatactaacattaggcaggagaattgcttgaatccgggaggcagaggttgcagtgagcagagattgcgccattactccagcctgggcggcgagagcaaaactccgtcaaaaaaacaaaaacaaaaaaaacaaaccatgctttcaaatctgcctaacaattatagcttcagagtccttgtattcaggattatctatttgtaacttactactttttacaaatatttttcttacactaaattagaaagaatgtttggtctcgcaggtgtctgagaatctttagtaaaatacccctacagattctattttggaatcatggttttaaaaaaagcaaaagtgtgtatttccaattaattgctacagagatgccaaatgtccactcagtagttgtgagtaaaacaaattgtcttattgctcttcacttcacaggcaaataaactcttcgagtgattgtgtgaagttcagagtattaggtcagggatgaaatggaggctaatccagacacgttataagagaaaatatggaatagagattctaggggcactaaagcaaatgcatgaggtggtctatgcttctgagtccctcatagtatgttccttctgagtatttgtattctaaacctcaaaattacaattttttgtataacatttcttactggattctccaagatataatctactttttgaagaatatgacatttatgtagaaatagtggttacttaccaaactggtatttgctactaggaaagtagcatcagtttttggcatgggcatctgaactctgagaataaggtttgggattccatgacctcatctccttgctgggaagtgatggtcattttattcttccacctgtaattgcagtgacagtgtctccaagaggattggagatgatctctgaaaaaaatttttgaagttagaaaattgtagaaagttattaacattaattactggagttatccatttagaatgacatcatacctaaaagagaaaattatctgtgaaatgggaacaaataaaggtaaatagaggaaacagttctaagacatgggacatgtaagttgaacccttggttatgctggaatcttggctcctatgaaatttttttttttttttttttttttttttttttgagatgtcttgctctgtcgcccaggctggagtgcaatggcgcgatctcggctcactgcaacctccgcctcccaggttcaaacaattcttcagcctcagcctctcaagtagctgggattacaggcgcccaccactgcacctggctaatttttgtatttttagtagcgatggggttttgctatgttggccaggctggttttgaactcctgacctcaggtgatccgcccgcctcggcctcccaaagtgctgggattacaggcgtgagccaccgcgcccagccgaaattcttatttctacaaagtctgacattttttcattcatatgaatggtgaggaataacaaacttggaaggaaagaaatagtaaaaagagagtgagagtacaaaggtgaaagagttgagggaaagcattactcaacatcttatctggttcagaggctcatctagatttgtatttacagcagtgaacaacctacaaagaaatgtattctcaagtaggctttattcaaattaagagatgtggtctggaaataataaagaaaatattggaaaatatacactaagttataaagagacagattctatggaaaatatcagaataccagcaccaagtaataacgaacacgtgaagtaggtagaatttctataggaaatttctatagtcagggttgtccttatagtggagataatatttgagcatatatttaaagcacagcagagagagagtgatttgtaaacacagagaaaatgtgctatggaaaagaaatagccagtacagtgtccaaaaagcctggaagtgaaaaatcatgtggtcaaagcacaattcaagagtgactggtgatggtttttataccatcaaaaatctccccaatgtgcacaattacccatgtatccattcacatgccattatctcagacctccttgtcaactgtcttctcaaacatattcttccttgcccttgatcacattgccaggtcatggactgctatcctgtaaaatacttgttctttggacacttattcctcctcataaaaaggtttacaaggtatgccacttgtgacttcacctatggggaaaattttgatccccaactatctttcaagaggatgcagaatatggctctgaggcagccacagttttgttttgtttttttttttttgaaatttatctttttttcccaccctgccttatggtgctgacacaatcttttttattactaggtttttaagagcacttttaggtttgcagtaaaattaaggggaaggtaaagagatattccatatactccctgcacctacataagcatagcgcccctcaccccaaccgcagtggcacatttgtagcaattataaacctacactgacacatcattatcatccaaagtccctactttactttagggttcactcttagtgttgtacattctatgtgtttggacaaaggtacaatgacacgtgtccactattagagtgtcatctaaaatagtaatcctctgtgctccacaaattcatccctcctacccttctaaacccccagcaaccactgatctttttactctttcatacttttaccttttctcaaatgtcattaattggaatcatacagtatattgccttttcagattggcctctttcatttagtggtatgcatacaaggtacctccatgttttttcacgtcttgaagattcatttaccttcagcattgagtaatgttccattgtctagatatactacagtttcttttctttctttgtttctttttttttttgagacggagtctcgctctgtcgcccaggctggagtgcagtggcgtgatctcggctcactgcaacctccgcctcccgggttcacgccactctcctgcctcagcctcccgaacagctgggactacaggtgcctgccaccatgcccagctaattttttttttttttttttttttttgtatttttagtagagacgggggtttcaccgtgttagccaggatggtctcgatctcctgacctcatgatccgcccacctcggcctcccaaagtgctgggattacagacgtgagccaccacgcctggcgatatactacagtttctaatccattcacttactgagggacatttttgttgcttccaaagtatgccaattttggataaaactgctatacacacacatgtacaggtttttgtgtggacataaattttccactcatatggataaattctgaaaaatatggttaccgtattgtatggtaaaagtgtgtttagttttgtaagaaaccaccaaactccatttcaaagtggctgtacaactttgcattcccgtcagcaatgagagctcctgttgctgtacattttctcaaccatttgcagttgtcagtgttacagaggttgttcattctaatagatgtgtagtggtatctcagtgctgttttaatttttacttccctgatgacatatgatggggattatcttttcatacacttatttgccatctgtgtatcttctctggtgaggtatctaaacctaaagtctttgcccatttcgttttttaattaagatgtttcttttttttcttttttttttttttgagacggagtctcacactgtcactaggctggagtgtcgtggcatgatctcggcttactgcaacctccacctcctgggttcaagcgattctcctgcctcagcctcccaagtagctgggactacaggcatgcgccaccacgcccaggtaatttttgtattttttagtagagacagggtttcaccatgttggccaggatggtcttgatctcttgaccttgtgatctgcctgcctcagcctcccaaagtgctgggattacaggcatgagccaccaagcccggccctgaaaaatttacacaattatacaaaacttacttaacctatgcttcattacctcatgaggagtactgggaagttttgagtacgtgcaatggatggaaacattgaatttggacataaagagttgtgtcctttttttttttttttttttggagtcttgctctgtcacccaggctggagtgcagtggtacgatctcgactcactgcaaccttcacttcccaggttcaagtgattctgattctcctgcctcggcctcccgagtaactgggattacaggtgccaccaccacgcccgactaattttggaatttttaatggagacggggtttcaccatgttggccaggctggtcttgaactcctgaccttaggtgattcgcccacctcggcctcccaaggtgggagcagcaatcacacctgctgggattacaggtgtgagccactgtgcccagccagttatgtcatttttcactagtttctcagttgattacctgaaagtatgaatttttaaagcacaataggattcagcagtctcaggtaggaaaaaggtaacctggaaagatccctgcatgtgaatgcacacacagctttcagggatctgaggaaattcagcatgtgtaggatatagaggagatacatggtaggaggtgaagcaatatgtaatggttggttctgtaatataggcccagccaagaactctaacctttttcctaaaaacaatgacaagcccattgtgagatctaaccagatgtacaatagtagtcattccacttataaatttttgtagtaaatgtgtaaacaaatacattatatatttgataaaatcatttcacaacttttaattttattttattttactggtattaatttgtcctaaaggatcatttttattgtgaaacgtaaaatttgatctatctaatatatataaaatgtatatgtgtacatttaacaatgtgcatatatgtaccttaaaataatataaactttctgggcgacggagtgaggccctgtttaaaataatgataataatttgatattttatgcattaaaaacttttgtctgggcatggtgactcatgcttgtaatctcagcagtttgggaggctgaggcaagaagattgcatggccctaggagtttgagactagcctgggccctatagggagactccattcctacaataattttttttttaactagccgggtgtggtggtgtgcttgtagtgccagctactcaagaggctgaggtgggaggatcacttgagcccaggaagtggaggctgcaatgagctatgattgttccactgtactccagcctggacaacagagtgagaccctgtctcaaaaaaaaattaaatgttttgattatacaaggaaaatgaacattcatgtattaaagcttcatgttttatgaacaaaactgactttgcaggcaggagagcgttttctgggggcaccagaagcagggaacttcccttgtccgttggcttcagggctgcccactatccctccactatcttcccattgtagccctgtctggtgtcttttgtccctgacaaaacctacaaaaagtgactttaacacttcaggctgcatgcatttgaagagcaataagataacgttttttcgcttcccactaccagtggagatctgctggggtgggctgcatggaatctgaaatgatgtctaaatactgaagtgaacctctacactagagactgatatacagctgacccttaaacgacgcaggggtcagggataccgacccctgcggaattgaaaatgcttgtattacttttgactcccctaggtcttaactactaatagccaactgttgcccggaagccttatgaagttgcccggaagccttatgaattacataaactcccagtcgattaacacattttgtatgatatatgcatgatatatgcataatatatatgatatatgcattttgtatgatatatgcattatatatattttagtataagaactatacttgtactaaaacagaccagagaaagggtatcaggaaaattgtaagaggctcgttgacattacacccaattaaaaaaaggaaaataaaagaatacggaagggaaaatacatttactaatcattaagtggaagtggatcatcataaaggtcttcatccttgtgttcttcatgctgggcaagagaatgaggtcttgctgtctctggggcaagaggtcggggagctggaagaggcaggaaaaggagcacactcgaagtaacgtttattggggaaaaaaaacgcctacgtgtaaatggacccgcacagctcaaacctgtgttgttcaagtgtcaacctacttaagacctcaaacaccgaagcccctcagtcgccctggaaggcagcagacgcagcttcctagcgctcccagctgtctgcacacaaggcgccctccgtcgcagcctgggggagactacattacccagaaagccttgcgtcgagcggcagtactttgatccaatgaaaatccaagacaggggcatttccgtgtgggtctacccccgccccccccagggcgggacttgtggcgtcttcgcagcggtcattttggctgccctcccggaggtccgttctgtctgtcagccgctttggtacgctgcatcgggatcgaagtgacggaccgtgaaggcgcgagagtcaggtctgagggtcgggggcagagccgcccgcgaggccggcctggggatagcgatgctcgggttccccccgggtcgcccgcagctcccggtccagctccgcccacagactcggatggcgaccgcactgagggacccggcttcggtgagcgctgcgatctccgggcctcccccggccgagattcttaagtcccaagtgagaggcaccagctcacgtctctgtagcacagggtcggggacactgaggctcgtgggtggggcccctatttctgacatccgatgtggtgggcagggggacaagggacaggaccggcgcgtgcagggcttggacgggcaaccgagaagggggcattcaggaacctgggctccacattgttactgcagggaacaaagtttgagagagatctacctttattcttagggccgtgggagccatagagagcttgcgcaaacgagagacaccatctgagttaaatttgaaaaatcctctgcaggctgttcagtggaagaaaagactttagagatggatgaggacgttgaggcagagggaggttgaatatttttccaaggccacacaactggtgagaggcagcactaaggaccgaggcgcacaggttagacagtcgacccaaagttacgtggctctgggccggggcaagggtacagggaaggcctgtgcccatggagcactgccatgatcacattcctctgaggcctgcgtctttccacaggttcccatagctacagaggtgcttttcaaacttacacaggtaagtggaggtatctcagcccctcactggtctggaatgtccctccaccctccccagacagatattttctttagatttgtggtgtcatgggactcacctaccattctctcagcgtttggtttgggaaccctggagaatccctgagctaagggccctgagtccaggccaatgtttccatttggagcagccaatggaaagatgggtgaaaatttatgatagaaacaggtaggtaccagcttttggaactccttggaggtgaggctgagctggttcagggaactgcaggtttcctttatttctgtgaagtttggcatctattgtgaggaagttggagtttgggatcagaggagggagatttatctaacccaagtgttgacaggatacagagtggaaaacagaatgaacacagtgactaatgggaatgtgaagagacagcagggatcaatgacaccaaggtctggtgtctcttctgacttggggatcttgggaggagaatgtatggggacatggattttgagtcttccaaattgagactgttcatggtttcatcaatccctattatgctagggaagtgtgacctttgaagatgtggccgtgtacttctcctgggaggaatgggatctccttgatgaggctcagaaacacctgtacttcgatgtgatgctggagaactttgcacttacgtcctccctgggtaaggccctcatactcacccttgtgccctggactaggctctctgtttctccttttcctcaggagcagctctgtcctcatatctggactataggcactgcctccttccccagttccctgggtagatgttgtggactgagtgcaagcctacttcccttatcgtcccagcccaaaagcatcttgggtaaggatttgggatcagtagtcttacagtaagcctaatagatcccacctgacttgccttctccctgtctggtgactttctagatctatggcacccagttttccctcccttcgtgtacctaacatttatttgtgctagactgtgacatgaaatgtagtcactgacattgccactatttacacagactgttcttcaaccaccaacctttccattaacagcagaacactctaacaaattgtgccgcagagacattacacagactgttcttatagaaacctccttcaaggtgtttttctttgtttttaattgtaaaatatatataacaaaatttaccattttaatcattttcaagtatatagttcagcgcatttagtacattcgcattattgtgcaaccatcaccaccatccttctatagtactttttcatcttataaaactgaaactttgtactcattaaataataactcttcccatcccctggcaaccaccattttacttttggtctgtatgaatttgtctactgtaagtacctcatatgagtgggatcacacaatatttgttcttttctatctggcttacttcacttagcataatatcttcaagattcatccatgttgtaatatatatcagaattgcttctttttaaggctgaataatattcttttgtatgtattacagtttgtttatccattccttcatcagtggacacaggttgttttcaccttctggctgttgtgaataatattactgtgaacatgggtgtacagatacgtatttgtgtccttgctttcaattcttttgggtattggcccaaaagtagaatttctggatcataaggtaattatttttaatttttaaggaaccactaaaattgtttttcatagcagctgcaccattttacattcccacaagcagctgacaaaggttccagtttcttcacaccctcaccatcacttgttattttctgatttttttgataagtcatccaaattggtgtgaggtgatatctcactgtggttgtgatttgcagattactgatattgagcatctattcatgtgctgattggctatttgtatatcttcaaatgatattgcttattcaagtcctttgcctatttttaaattaggttttattaattataattagaagtattaaatataattttttattgagctttaagggttatctgtgtgttctagatattcccttatcagatatgtgatttgcaaatgttttctcttattctgtgggttacgtttttagtgtgttgataggatcctttgatgtacaagtttctcattttgatgaattcagttttacttttttacttttattgtctatgctttttatatcatatccaaggaatcattaacaagtccaatgtcatgaagctttttccttgctttaagacttctatagttttagtacttacattcagatctttgatctgttttgaattaatttttatatgtggtgtcaggtaagggaccaacttcattctttcacatgtagatatccagttttcctagcatcatgtgttaaaaatttgtcttctttctcctggtcaaaaatcatttggccagatatttgagggtttatttctggggtctcttctagtccattgatctatatgtctttctttatgggagtaccacactgttttaatttctatagccttgcagtaagttttgaaattacgaactgtgagtcttccaactttcatccttttcaagattgttttagctattctgtgtctctcgatatttcaaatgaattttaggatggatttttttatttctgcaaaataacgtcatttggattttgataggtatcgcactttctatagattactttggctagtatagacatcttaacaatattgagcactctagtccatgagcaggcatgtgatctattttattaatgttttatttaattcattttagcaaaattttgtagtttctagtgtacaaggcttttacttgtttggttaagttaatctttaatgttttattctttttgatataagtggaattgtttacttttcaaattgttcaccattagtgtatagaaacgtaactgatttttgcatgttgtatttatattctcctatttgctgaatttccttattagttgtaacagtttttcagtggaatctttatggtattccatgtatatcatctgtgagcagggataattttactcctcctttcccattttggtcccttttctttctttttcttgcctaattgctatgttgaacagaagtgctaaaagtagcatccttatcttgtccttaatcttagaggaaaatctttcagtctttcattgttgagtataattttagctgtaggtttttttttttgcatatggattttattatgtttaggtaatttccctgtattcctggttttctgagtgttttccccacgaaaaagtgttgcatattgtctaatgctttcagtgcatcagctgagatgatcgttttaatttttttagagatggggtcttgctatgttacacaggctggtcttaagctcctggccgcaagcgatcctcctgcctcagcctaccaagtagctgggattacaggtgtaagccaccactttgatcagtttttgtttgttgaaccatccttgcattccaggaataaattctatctggtcgtagtgcataatccttttaatatgctgttgaattcagtttgctagtgtttggttgatggtttttgcattaataatcatcaaggatattggtctgtagttttattttcttacacaatctttgtgtcatttggaatcagggtaatgctggccatacagaatgagtttagatgtgtgtatgctacagttttttgagagaatttgaaaaggataagtattagttcttagttaaatggttggtagaattcatctgtgaagccatcaagtcaagggcttttctttaaggtttgtcttttttttttttttttttcttgagacagagtattgctctgacacccaggctagagtgcagtggtgtgatcttggctcactgcaacctccacttcctggattcaagcaattctcctgccttggcctcccgattagctggggttacaggcacatgccaccacacctggctaatttttgtattcttagtagagatggggtttcaccatgttggccaggctggtcttgaactcctgacctcaggtgatccacccacctcagcttcccaaagtgctggaattacaggcatgagccactgcacccggccaggtttgtcaattttgataaccttttcaaagaaacaccttttggttttgttgattttttttttatattgtttttctcttctctattttatttatctagactttagtctttattatttttttcctgccagctttggttttagtttgttcctctttttataatcccttaagttgtaaaaatagattgttgagttgagatctttcttctttttaatgtttatagctataaatttcccctttagtactgcttttactgcatctccaatttatttcccttctgatttcttcatggccccattggtttttcaatattgtattaatttctacagatttgtaaattttttagtttccttctattaagagttcccaacctcatcccactgtggttggagaagatactttgtatgatgtgtgtctaaatcaaatgaggcttaatttatggtctgtcctggagaatgtttttggtacacatgaggggaatgtacattctgttgttgttgggtagaatgctctttatatatttgttagagctagttggttgtttaggtcctctgttttctctcttctctctgattgttctatccgctgctgagagtcaggtattgatgtctctaactgttattgtagaactatccatttctcccttcagttctgtccatttttgcctcatgtgttttgatggtctattattaggtgcataagtgtttataagtgttatatcttcttgctctactgaaccttttattagtatataatatccttttatatctcttgttaccctttttgatttaaaatctctattgtatgatattaatgtagccattcttactcttttttgcttgctatttgcatggaatatctttttgtaggctgtcactttcacctcatttacatctttggatctaaagcaaatctcttgtagacatcataaagttggatcatgggttgtttttattttaacccattctgccaatctttgtcttttggcagagtttaagctaaaagttgggagcatttaaggcatttacgtttaaggtaatcactgataaggaagggcagacttctatcattttgctctttgttttccccatgtcttatagccttatagcttttttgatcctaatttcctgcattactgcttcttttgtgtttggctcacttttttttttttttttttttagtgaaacttcccttgtcatttcctttatgtactttttttttttttttttttttttttttttttaatggtgtctcactctgttgcccaggctggagtgcagtggggcgatctcggctcactgcaacctctgcctcccataatcaagcgattatcctgcctcagcctcctgagtaatccctcctgggattacaaacgcacaccaccacacccagctaatttttgtatttttagtagagacagggtttcaccatgttggccatactggtcccaaactcctgacctcagttgatccacccacctcagcctcccaaagtgctgagattacaggtgtgagccaccacgcccagttctttgtatacttcatgtagctctttttttaaaatagttaccatggggattacatttaacatcctaaagttacaacactctaacttgaatttatacaaacttaacttctttaactttccttgttcttttttgtgccgtgttgttctgggccagtgttagttgctcacatgtcctgtctttcccttaggacttatatcatcctggtctcatgtagttgctcaactagggctaggggaagtgccctctgttcttcacaggatgttcatgactccagcctcagcaagatgggatcagagagggcctggcctacatgaatggcacttgggaaaaggcatgtcatcaggtctgtgtttaaattgcaccaggaacctgtcctgtttgacttgtcttgatgccattgccagagacacttcacttcgaccttcccctcttcactcttaacagtttacaaacttgttatttctactacttgtcatttttattttgacttctagctaacgctaatcctcacctctctggactccttatcctacctgttcttttcactgttccctctgtagtgttctttaatattattttgtcctgaagtgtgcatatctcccttaatagtccctgaacaccagttactgttccagtgagattttcctgggcctgggcatacacttcacagcatcacttgtcaccagcagatgtgatcccactaaaagctattatcagaagaattaattgtataacatgcctcttagtcctgggccataccttagccttgtgcactgtacctgggagggcctaccctattccgtaaccttagggacaagtaatgcacaacagctgcttcctcaacctgaccccccaactcacttttcctaaaaacaggcccatatactggttctttgctgtaactgatgtgcatttgcaattgcattgtctcctcctaataaaggtaacatgtacttcaccatgatctctttacttttaggttgttggtgtggagtggaacatgaggaaacaccttctgaacagagaatttctggagaaagagtgccacagttcaggacttccaaagaaggttcatcttcccagaatgccgactcctgtgaaatatgttgcctggtcttgagagatattttgcacttggctgaacaccaaggaacaaactgcgggcagaaactacacacatgtggaaaacaattctacatcagtgcaaatcttcaacagcaccagaggcagcacattacagaggcacctttcagaagttatgtggacactgcctcgtttacacagagttgcatagtccatgtgtcggagaaaccctttacctgcagggagatcaggaaagacttcctggccaacatgaggtttctccatcaagacgccactcaaacaggggagaagccaaataacagtaacaagtgtgcggtggccttttacagtggaaaaagtcatcacaactggggaaaatgcagtaaagcctttagccacatagacacacttgttcaggaccagagaatcctcactagagaaggactttttgagtgcagtaaatgtgggaaagcatgtacgcgaagatgtaacctcattcagcaccagaaagtccacagtgaagaaaggccttatgaatgcaatgaatgtggaaaattctttacctactactccagtttcattatacatcagagagttcatactggagaaaggccttatgcgtgccctgaatgtgggaaatcgtttagtcagatatacagcctcaatagccataggaaagttcacactggagaaaggccttatgaatgtggggaatgtgggaaatcttttagccaaaggtccaacctcatgcagcatcgcagagttcacactggagaaaggccttatgaatgcagcgaatgtgggaaatcttttagccaaaactttagcctgatctaccaccagagagttcacactggagaaagacctcatgagtgcaatgaatgtggaaaatcctttagccgaagctccagcctcattcaccaccggagacttcacactggagaaagaccctatgagtgcagtaaatgtgggaagtcatttaagcaaagctccagcttcagttcacatcggaaagtccacacaggggaaaggccttatgtgtgtggggaatgtgggaaatcctttagccatagctccaaccttaagaaccaccagagagttcacactggagaaagacctgttgagtgcagtgaatgtagcaaatcctttagctgtaaatctaacctcattaaacacctgagagttcacactggagaaaggccttatgagtgcagtgaatgtgggaaatcctttagccaaagttctagcctcattcaacaccgcagagttcacacgggaaaaaggccttatcagtgcagtcaatgtgggaaatcctttggctgcaaatctgtcctcattcaacaccagagagttcacattggagaaaagccttagctgtactgagaatatgcaatttccttttagtgtaattatactgaaggagtacacctgtgagagagacaagtacctgatttggaagccccaacatctaaggatatacagtgggcggattccccttaagttccaggtatgtgttacactttctaacatgccatttagaaagtgttagactttctcacctgccatttatggctcttgccgtttatgtcactgacagtttctgaggcagaagccgtatcatgtctaccacctgtgaggtccacacagtgtgtatcatttacctcctgaacctgctcaaggaagcagacctctgcttctccccatttgctagaagaaatcatgaatagtctgagtcttcctctctgacaagttagggcatggacttgacccagctttgtgccagagaacccaatatgagtgttgttggcagcttgccaagaaggactgtctttttcaagacatactggtttcatgtgacacctccatggatttttttccagcctctaagtcaccaacttgggaactgcttgtctcacgttgctttgttttttacaataataaaagcattattatttaagctacctttatcttggcatttgattcactctttgaggtggttcaaaaacagaatcgggccctgccagctttacagagtaaacacctttggagggagagggaggtgtcatatgcctcagtgacaacagtataatggaaaaatacaactgtctttccagctttggcctaatctgaatttgaattattgcccaaggccttctaggaaatactgcaggatattatggtcttaattcgtggactggatgcaaggattttttgtgggctcaaaggacaccctgaggaagtgggaaattgtgacaaattccattgcttctgggaacaagatgaattttgttgttattcacaagggttattacatactgcccagcactgttgaggcagtctacccccagtgctgccaaggagccaagtgccccaatacaatttagtaggctactgtcactgtaaaatgatgggggaaccataattggtgtggaaacactgggttactagggagtgaaggagactgcagcaaactagatggaatgtgctccttgtaatatgttctagtaattgtgcaggatcagtgtgtacagacattcttagaatttccaggcatgtgtattttttgtagctgaggtgactgtcaaaaaataataaacaacctaaaggttttgtgtattccaatagcctttctgggatgtgcacctcaagaacattgctgcataggccaggaaaacaagcatagaaagaaggggcgggggatgtccttccaggaatgtgactttgtaacctaccatcatcctgtgtttaaatgaattcaaatcagtttcattgattaccagtatttgctgcccactgaggcaaggtgtccctccaaggtcatcaggaaagagagttaatgtagggttaccaaacctagtcaaaaacacattataccatcattataattattacaatgaacatatcagtcacctcggatttacctcaggcctttttctaagctctccctcccctctctggccctcaaggcaaccattgatttataccttcatttataataggtttgtttgtattttctataatatatgattttattaataaaatgtctttttttccagtttcattcatgatgcataattattttgagattcttcaatggagcttatatgtggtggtcattctttttattgctgagtggtatattttttatggatatactatttgttatccatttgtttataagcatttaggttttatctagttttggctattacaaataaagctgctagaaatgtacaattcttcatatgtgcatttttttcacttctcttgtgcaatgcctgagacacaggataaatgaatgtttaacttattaagaaatggccaaaaatgggctgggtgcggtggctcacgcctatactcccagcactttgggaggccgaggcaggcagatcacgaggtcaacagatcgaaaccatcttggccaacatggtgaaaccccatctgtactaaaaatacaaaacttagctgggcgtggtggtgcgtgcctgtagtcccagctgcttgggaggctgaggcaggagaataacttgaacccagaaggcggaggttgcagtgagccgaggtcacaccactgcactccagcctggcaacaaagtgagactctatctcaaaaaaaaaaaaaagaaaagataaatggccaaattgatctaaaatggctgtttgctcttgcttacctactgggaatgtgtgagaattccagctgtttcacatccttgccaatacttggcatggtctatcttttagaatgtacccttttaataagtgtgcagtagttttaattgcatttccctaaggattcatgatgttgaacattttttcatgtgtttatttgccaaatgtatatcttcttttttacacttttttttttttcttttagacggagtcttgctctgtcacccaggctggagtgcagtggcgtgatctcggctcactgcaagctccgcctcccaggttcacaccattctcctgcctcagcctcctgagtagctgggactacaggtgcctgccaccatgcccggctaattttttttttttttttgtattttttagttgagatggggtttcaccatgttagccaggattgtctcgatctcctgacctcgtgatccgcccgcctcggcctcccaaagtgctgggattacaggcgtgagccactgcacccagcctgccaactgtatatcttctttgataaaatgtctgttcatatacgttatctgtttgttaggaattgtgtctattttgcttttcattaacaaatcactagtttttgttccacaattaatttcatgctatgcacagtgtaattaccatatataccacacacttttaaatttaatctgtattattcacatattctctatcacattcttaagtctagacacttagtagtacagtgaatcaagctatggtttatagtgatgccagtttccctggtgtaaaacttcccattgtggccaatttcaaactgtcatcatgtcactgaatttggggttgggaagagccatcagaaacataccatttccataatagtgatccatatttaaatttacttctaaataaatttatttgcaagtttactacctgcaaatagcctctagaatgtagacaataaaacatagtaaaatgattaggaagtgacaaattttgaatatttgttttttaaaaaatataaaagaggtataattgacaatgcaaactgcacatatttttaaatgtacattttgatattttgatacacgcttatacccttaaaatcaaaaatttcattgaaaacaagtgaaaagacaatctgtaatactgttaacagttaacagttaagttattctgttaaatacatcagttgtccaaaaaacaaagtaggcaacatatttgaaatacaggcagttcttgctctattcatcttcatgaactgaaaatgccttgacaaaacatgagaaagaatggaagttaacaattgagatgaaatttgccaacatttattttggaatcaaagtctattttcattatgaatcctctgggattttgtaacataaagttttctagtgcaaatacattgggatttattaggatttactgataaagaactctcagtcacattttagttgtccatattatatatttggtacattctgtgataacggaaagtacaaatagcactaatgttttggggaagaaaatagctacttgttgcctccttcccacagaaccagggctagataatgaggagcacatctcactaactgatcacacagctgtctgtagacatttggccaggaagagcactgtgggatgaatcaaacaaccaggaaatcaggtggaggagaatcagaagagatgctactgtttgttttcaagtaaatcaggctatctccagaaggatcatcaatcatagataagtgtttacttctagtgttacacaggtagaacagaaagtatgttaaatttatatgtatttgaaagaaaaatttaagcatgaagtaaaaactgaaggaacattctagaaaagttttagtacacaaaataagagaatgtaattaaacggtatttcactgtagatttctgctactttggtctcacccattaaatcccctatacctcacatagttgacatgaacaaagccattcattattccactggcaaatactttcctgttatatatgttctattcattacctattccaacagcctctcatacacattcaccttcgaaggtgatttcaacagttctcagctgggcgcagtggctcacgcctgtaatcccagcactttgggaggccgaggtgggcagatcacttgaggtgcacatcatctggtgtgcttagcattactccatttctgatactgttagaaggcaacttctaactttgtcagctccaaccaatcccaagctggccaagcacctattgggtctcttttgctcctggaggcaacatagtctccatttacaaataccactcaggcctatttattcacccatccacaaaacagcccacttttggaggcctttacaacagaaggccctagagtcagttcagatgaccatataacagacatttcctttagtgcctcctggagattccttcatggtggactacccactagactctcttcttagactctggaccacacatctggccataagctgcccatgggcttctggtgcaaaaaactgcctgttttgtcctcatgtaacatgcaattagagcaacaactgccagctacatactgggacctcttagaaacagaagctctcacaggacctgaaccatggcacactccacccagttacacattattacctgggtcatgaaagcaacacctacaagctcagcctgatcaccaaggccttgatacaggatggagccaaacctgggccccctggtgtatctcacttggaaaaagaggtggccttctctgtcctcagtctcttgccagatgccatggtgaaggaagtctcctctctcctgggcccttggcagccctggaatcaagtaagtaaacaacaaggggagaacacatactttgttgacagtaatgccaccactacatgagctggagctctctggaggtctgctgcttttcttctaaacaagacacactgctgaaggatgggaactgcaggcagtcattttagcgctggaggctaccttggccaagaaattacctcaattacacttctagtcatttggtgcaaccaatggcaacaatttctcgttcaagatcatactcttggggtaaacaacttcaggaatttcttgcctctcagatatcaaagatataaattaagatcatgtatgtctccgcccacaccaaggctcagactgctgaagcctaacttaattcccaagctggtagattacaacaattttcaaaaactaggaccaaaactttgttggatgaccttccaggcccattcctttatttttggcccaataggcccatgaaacaacagtcatagaggaacctctatgaggaacccaatcttgaagactggggctaaacacaaagtgtttccccacccctctaccatggccaacatgatgacgggtcagtgcactctgtgggaatacctgtcattggcaagacaactgaggtgtgctattctggatcccacttttagtcatgtggcaggtagattttaccaggccactgcctctgtctaccagtgccacttgttatgctttgactgtggttgatgcctaccgccgacatcttactttaccccactagacatggcactgctgaagctactatacagcaccacaaaacgctcctattccctttggagttcccgacaacagcggtgaacaaagctctcattttagacaaagcatttgagagaacttgcgacattccaatcagtcccaggctgctggttttatagaatgccacaatggcttacttaaaacttagtagaaattatgaaatagcatatggtcttatagatgggtctttttcctgccattagaccttattatactaaattcccagctctattccctgccaaaatgcactgaaaacatctccattagatttcattgccctctgtggtgacacttcacataacagagcttacaaagatcatattgaactaggcattcctcctgttcttcctctttctgctatcacttttcagtccccatcctgactggaaagaaagacagactgagggtggattgtgagttatgatcctcatgaatgaatgcccctttggcttcctgccagagccatctggcaccctgctaacgttgagtcgcctaaggcaggagttttgccaaatattcttggttataaaggatacttaattacaaatgcccataatgatctcactcaggaaagagaaatcatggctccaagacccacaaccacaccgtgtcaataacaggccagcaaagaccaaaactgaatttgtctaacagcatcctccactaaggaacgcaggctccccctacctcattggcagttttgtacacctgtgtgtgtgtgcgccgtaggctccctttcaactgcctcaccatgtcacagcttattcagctgactgtaagccttaccatggcactctccacacactctccacacataatctatttggctggtcacacctcaaacctaaacttgttctcctggacttctcttaaaaatgccaactccagttattcaagatgacccactattatgtctgaccaaaatgttcactggcaataattcataccaaataccaagtccaagactttagcccctgagaacttattggttgtatttcccgaaatacccctcgcttctgaagttattgagtccttaatctcagacttctcttaatttgacttgcactatgtgcattttggggccaaatataaccttttgttatcctgccaaaaaaagttctgtattttgattgtgatggtgattacatgtatctccacacgtgataaaattgcatagaactggccagaagtggtggctcatgcctgtaatcccagcactttgggaggccaaggctggcagatcacgaggtcaggagtttgagaccagcctggttaacacagcgaaaccctgtctctactaaatatacaaaaattagctgggcatggccgggcccagtggctcacgcctgtaatcccagcactttgggaggctgaggcgggtggatcacgaggccagtagatcaagaccatcctggctatcacggtgaaaccccatctctactaaaaatacaaaaaattagccgggtatggtggcgggcgcctgtagtcccagctactcaggaggctgaggcaggagaatggtgtgaacccaggaggcagagcttgcagtaagctgagatcatgccactgcactccagcctgggtgacagagcgacactctgtctcaaaaaaaaaattagccaggcatggtggcgcgcacttgtagtcccagctactcaggaggctgaggcaggagaatcgcttgaacccaggaaatgcaggttgcagtgagccaagatcaccccatggcactccagcctgggtgacagagcgagactctgtctcaaaaaaaaaaaaaaaaaaagcatagaactacacacatacaacgagtgtataaaatggtgagctctgaaagaggtctgaggattgaaccaatgtcgcattcctggttttggtaatgtactaaggttatataagatgttactattggggaaagtaggtgaaaggtactctgcactattgatatggtttggatatctgtcctgcccaaacctcatgttgaaatgtaatctccaatgttggaggtggggcctggcaggaggtgattggctcatgagggtggtttcccctgaatggtttagcaccaccctttggtgctgtcctcacgatagtgagttatcatgagatctggctgtttgaaagtgtgtggcacctccaacttcgctcttgctcctgatcccacaactacatttgcaacatcctgcatatctgtacttcaaaataaattcttaaaaatttttcactgttccgtatatttccacagtgtatatagttcactgttctgtatatttctacatcagaatgtataattttcggccgggtgtggtggttcacgcctgtaatcccagcactttgggaggccgaggtgggtggatcacctgaggtcaggagttcgagaccaaactgaccagcatggtgaaaccccctctctaccaaaaatacaaaaattagctgggtgtggtggcgggcacctgtaatcccagctactcagaagggttaggttactcaccactatactaatgaggatgaagcctctttttttttttttttttgagatggagtcttgctcttgttgcccaggctggaatgcagtggtgcgatctcgactcactgcaacctctgcctcctgggttcaagcgattctcctgcctcagcctcctgagtaactgggattacaggcgcctgccaccacccctggctaatttttgtacttttagtagagacaaggttttgctatgttggccaggctggtctcgaactcctggcctcaggtgatctgcccccctcggcctcccaaagtgctgggattactagtgtgagccacgatgcccagccaaagtctcttttttataagggccttaatcatactcttaagggaggagctgtcataacaacctaatcaccttctaaaggccctatctcttaatctcataataccattgcattagaaattaagttttaacatgaatttccaccagcctcaggggctcacaccggtaatcccaccactttgagaggcagaggcgagtggatcacttaagcccagcctggccaacatggtgaaaccctgtctctactaaaaatacaaaaattagccaggcatggtggcagacacctgtaattccagctgcctatgaggctgagatgggagaatcacttgaacctgggaggtggaggttgcagtgagctaagatcacaccactgtactccagccagggggacagagtgagactccatctcaataaataaataaataaagataatgttagcccaaacggtgccatttcataaaccctggacagagtggaaaattccactaggtctttggctgtgagaaacatcctgccagacgagtcccaagcctaaccacctgactgcaggaaatccctcccttatcagcagctaaccacaacgccccaccccagtctacaacaagcccagacctctcccgcctagacctataattaccccaatctgtaagcaggggtggactccagcgctagctggtgtccccgtctacaggcctttgttcaataaacctgtgttgccatagagccatctccattccgttccttctcccttccttgctctcagttctgaaacccgggacgacgcttgggttcacttggaggaatccctttttgcaacctgggaagcagtgagcagcggcagctcatcccaggtgaattcccagatcctaattagacccttcactcccagccccgtcttcctaccactttcccttttctctccttcttccactaggaggctccagcaaggatcactccaattactggacatcatatccaacaccagtctccgatttctgggtgagttccccctttccccctctggattcctctcatatttccagaaaagcccagtgccaggtgagagaactccccagtcaccactgggtaaccctgacctgccttctcaggggatgtcctcagaatgctcactgctccaacccccaagggactgtgaaaagcttcagggatgccccagctcttctccatccctcctcatgattggaatcaggatactcaccaccccacacacctatctcaccctcctggccaccaatatggggcagggctcctaaaaaccccctcaagacacccctctcagatactcatccagaacctcaaaaccctgggcttggtgcactccattaaaaccaaatgccttattttcctttgtaatgtggcttggccccaatataagctggacaatgatagttgatggccggaaaacaggacattgaacttccaaattcaacgtgatctaaaaagctttctccaatgcaatggtaaatcgtccggggtgccctatattcaggcctttgtttatctctgtttgtggtcctctctctgtcaatcctgttcaccctttcaaatcctcctcttcaacaaaagacccacgaaaacacctcctctttcggacaagccttcctcctccgattttgacccagtcgatgaacctctgcccttgaacccctcctcaccaccatatcctcctccttctcctttggttccatctccccctctggctcctccacccccttaccatcatcctccattctcccttctttctccactgcatacacagtcctgtgcctaacaccctcccgctgaaggccatgcccacatccaaaaccctttcagagtccttcccttgtgggagacggcaggggctgaaggcatagtctgagtccatgttcccttttccctagctgacctcttccaaattgaaaagagactcagctctttttccacagaccctgcctccttctgtaagagatttttgtacatcactcaatcttatgacctaatctggcatgacctttatgtcatcctctcctcccctcttacccctgaggacaggggacatgtctggacagctgctcaggctcacactgatgctctccaccaccaagatgcagctcataacccagttggggccttcgttgtccccagaactgatcccagtgggattatcagccaacttccccagacaggtaaaggcaagatcataagataacatgcctcctggcaggcatgaataaagccactcttaaggtagtcaactatgaaaagataaaggaaattattcaaggccttgatgaaaatcctgctcttaaccagcctgatcaacatggtgaaaccctgcctctactaaaaaattagccgggcatggtggtacgcctctgtaatcccagccactcaggaggctgaggcaggagaatcacttgaacctggtaggtggaggttgcagtgagctgagatcactccactgcaatccagcctgggtgacagagcgagactccatctcaaagaaaaaaaaaaaaaaaaaggaaagaaaatcctgctctttttctttctcgcctttcagaagccatgattaaatacaccacctaaagccctcaggccaacaagggcagaatctatctccacttacatttcatttcccagtcaacccctgatattcagaaaaaaactccaaagactggaagatggccctcaaaatctccagagacttaatcaaagtggccttcaaagtctttaacaatagggaggaagaaccgaaaacccaaaagttcaaaaggtactaggctaaataccaggtgctggcagatgccatacaacagggttcccaatgcatacaaaaatcctcaacctcaggacagccctcaccaggagcctgttttaagtgcagccaacagggtcattgggcaaaagcctgccctaatcccaggctgccctcaaaaccttgccccatctgtggtatcaagggacactggaagtcagactgtgctcagcaagacgcttcatcctgcttgaccacctctaactcaaacaggtcccccattccagatcccagtctggcaagcattcttggcctggccactgaagactgacaggatcacccactaccatcaccaccttagaacgcagggtaacactgtcagtctctggtaagctcatgtctttcctgttggatactgggcaacatactcagttctaccagaatattctggacctctcctcagttcttccatcactattttaggagttgatggaataccctctaaacataaacagactggccccctattatgtaacctagtcaacacttgcttcacccactcattcctggtcatccctcaatgtcccacccctattttgggactgaatatattaatcaattccagttttccatagaatttaccccctgtcattctaccccttttattttactctgtcaactggacacttccctctcctctccctcatcttccttatccaatttgctagcctctgtcaaccccaaggtttgcgatgtttccaagccaacaatagcagcataccacaccccagacaaaataacctttcaaaacccttctacattcctttgtcagcccagtacctccttagcccagctggcctcagagacctcaaactcattcgttggaaattcctgcaagcccaaattctcaagcctgttaaatctctccacaacacccctatcctggccatctggaaagctgatgggtccaactacctggattttttatttattaaccaggcagtggtgcccatccatctggtggcccccaatccctacactttactttcccatatccccccacctccaccactcatttatctgtattggacttgaaggacaccttttttcaccatccccttggatccagcctcccaaagcctttttgctttcacctggacagatcctgatactcacacatccgcacagctaacatggactatattcccacaggggggctggaatagcccctgcttatttggacaggccctcaccagggacctggctaaacttccccttgctcctagcaccctcctccaatacatcaataacacccttctctgtagcccctcccttaacctatctatccatccaacacatcattcagcttctaaactttctccattcttggggatattaggtctcactcacaaaggctcaagtaacccaaccccaggttacctaccttggacttatcctaatccctaatattcaggccataccaacccaatggaagaagctaatccgggatatgcccctttctcatacaaagaacctcctttccttcttgagccttgtgggatacttctggctatggattcccaacttgctgaccaagctgctgtacaccacatcacgtgggcccatcctagaacacctggatccagtctgtaccattgactcccagttcaaaaaactgaaaaatgccctttcaatgtcgccagcactgggactacccaaccccaacaagccctttactctgtatgttcattctaaccaaggccttgttcttgggctactctgtcaaacattcagcggtaccccacaagccattgtatatctctcaaaacaactgaactcagtcatctaaggttggccaccctgtttaaggatcttatgtgtgtctatgctgctggcctcagaagctcaaaaactcaccctctatcaatacattaccattgcaccttctcataacctacaggaactcatgagtcattgctcccttctttccctcctgctatcttacttacaacaaacacacacctcctacataaacaaccttctaatcacctaccaaagatgtaaagttctcaacccagccaccctcttccctataaggacctttgactctgaactctgtcactcctgcttggactttttagattccctttccttccctttccgacacatatcagagacccccttacaggggacacctacatggttcattgatgggagctcctttaaagagccatgtcttgcagcaggctacaccatcgttgccaaacacaagctcctagagtccaatactgtcgcatcccctaccacctcctaacaggcagaattagtcgacctaactagggccctcaccctagcaataggaaaaagggtcaatatttacactaactgtaagtatgcataccacattctacactcccaagccttaatctcacaggaaagagcttttcttagtaccaaagggacctgcatagtaaatggcaaactgatacacaggttgctggaggtagctaaactaccattagaggccaccattatccattgcaatggacaccagagagctacagatgccataaccaagggaaacattatggcagactcagcagcctggcaggtggcccacaacatcccatcactgttgtccattttcccagcagacatccctcatacacccaggaggaacaagtcaaactaacactggggctacccaaagggaaggctgatgttatcttgacacaaactcatcctgcccaaatctcaagaactctctattccctcccacatccacaaccacttccatgctggttattaccacataccccagtttttaaaaacttacacacactccaccaccatgacaaccaaccttgaatgtttaaccagtctgcccagtttgtggtcagacttcccctgaaggggctcttaaaccacctcctttctccactcatcaggcatgaggccatttcccagaacaggactggcaagttgacttcacccatataccccctgtaaaaaaaggaaagggccaactacagcctgggaaaaatatttgtgaaacctctatctaataaatgatgagtattcagaatacgtaaaacatccctacaaatagcataaacaacacaatttaaaaataggcaaaagttcaagaccagcctgggcaacatggcaaaacactgtttctacaaaaattagctaataagctgggcatggtggtgtgtgcctgtggccccagctacttgggaggctgagatggaaggatcactgattccagggaggtcgaagcttcagtgagctatgatcaaatcactgcactccagcctgggcaacagggtgagatatcatagctgtaattccaacgctttggggggctgaggaaggcggatcacttgaggacaggagttcaacatcagcctggccaacatggtgaaacctcgtctctagtaaaaatacaaaaattatccgggagtgtccaggagtggtggcaggcacctgtaatcccagctactcaagaggctgaggcaggagaattgcttgaacccgggaggcagaggttgcagtcagctgagatcgcgccactgtactccagcctgggcaacaagagtgaaactccgtctgccctccgtctgtctgcaacagagctagactccatgtcaaaaaaaaaaaaaaggcaaaatatttgaacacatttttcactaaagatgatatatgaatggtatataaatgcatgaaaataagttcagaattattactatttaaggaactacaaatgaaaaccacaatgagataccactacatactcattttgatgagtaacattaaccgaatgatcacacctagctgttgaaggtatgaaataaactggagctctcatacattgctggtggaaatgcaaaataaataaatttggaaaacactgtagccgttattaaagttagttgtccacttatcatttgataaattaatctcattcctaagtataacctcaagagatggaaacgtgtccatagaaatacttgtataatcattcctcagtatccatgggggactgattccaggacccccaaggataccaaaacctgaagatgttctagtctcttatataatatgatgtggtatttgcatataacctgtgtatatcctcccacataatttaaattataatttaaattacttataatacctaatacaatgcaaatgctgtttaaatagttgctatacattgtcacctaatacagtgtaaatgctgtttaaatagctgctacacaatagttgtattgtttagggagtaatgacccaaaaaaggtctgtgcatgttcagtacagatgcaatttttcttccaaatattcaatttgcagtgggttgaatctatagatgcagaacccatggatatagaaagccaactgattttgcgtgttatcaacaattttcttcaaagctaaagactggaaaacaaaaacaaatgtctatgcacatctgaatgggtaactgtgttacatttataaatagaatattcctcataaatgtcaaggagggaaaaaaacattaatctgaatctcaaaagcacaagtgaaggaaccaaactcagaggtctatacagagtaaaatttctttcagataaaaatctagaaatggtaaaactcaagtggcaaaatgcaaatgagtgatcctcagatctgggcctaggaggaaggggcggactgcaaagggcagaagagtacatagggtgaggagaaccttctctatcaggattgtggtagtggttacatgctgtttatatttgtcagcactcatcaaattatacactggaaattggggatcatcctatttgtattatactgcactaaatttgtttaaggaaaataataatacacaccaaaaatattcacggctcaagaagtaatatacttcctgccgggtgcagtggctcaggcctgtaatcccagcactttgggaggccgaggcaggtagatcacctgagatcaggagttcaagactagcttggccaacatggcgaaaccccgtccctactaaaaaggcaaaaattagctaggcatggtggcacgtgcctgtaatcccagctacttgggaggctgaggcaggagaatcacttgaacccagaagacagaagttgcagtgtaccaatatcatgccattgcactccagcctgggcagcagagtgagactgtgtctcaaaaaaaaaaaaaaaaaaaagaagtaatatattcccaaattgctctcaaaaatactcttccttaatcttataaagaacatctgcaaaatcctagagtaaatacaataactcatggtccattattaaaatattttcgggaccagaaaccaaaggaggatggtcactgtctgcacatatagtcaattatattgaaagtcctgtctcatgcaattaggtgagacaagaaatatataatctgtaaagaagaaagaaagctaagttcctcgcccccttaaaatatatcttaaatgtcattttcactgtaagtcctactatgaacacctgatttactgtttcaccccatccttaccaactttacttctcagctgtatcctgctctataggacccatcattttctaatacactatcagccgaataacatgggtgctttgcttactgcttactgtctgtttctatcaactaagtctaagttccatgtaggcaattttctttttaattttgtgtgttgatataccccatataatgaaaaaatgacctgacccacaaaaaatatgcaataattttttttgaggggcagagccttgctatgttgtccaggctggagttcagtggcatgatcacagctaacagcagcctcgaactctcaaaactcttgggttcaaaggatcctcctgcttctgcctcccaaagtgctggtattgcaagtgggagccgctgcacctggtctcaataaatagtttttgaaacactgaagaaatatgacataccaatttcctattcatttttacctctccagaaattctgtctaattcattcactgtctctaccttcaagttacctttgttctatgggatgactaaaaaactcacacacagctctatattctgctaccaaaaccttcaaagcggccaggaatccagcagagccatattctcaccttcattctctttctccttagatcttgctgtcctctgcttacctaccctacagatcaattttatttttactttttcattttttcctacatagggtgctcctcagctacttctgtcattcctattagatatctttatgattcaccattaatagtttcagtaatatacacaatactcaaatgttcttcgcaaataacctccattctccttacagatggtcgctgcaattacaggtgaagtgataaccacttcccagcaaaaaggtgagatcagggagttccaaatctttatctcaggttcagatgtcctttccacacctgtacagatgccgtcactccatcattctgacaccagatgccaagtgagtaactcatgcttttcaagtaagtttcaggtccttagatggaaactatctcagaaaattcagtattaattgttctctgtaaaacatttctgggtttggaacacgaaagagtttatatagcaggaaggtcatttgctgagaaaactagacacacatagcatcctgtctatatgccacagataaagacttgatgctacagacatgttaagaacagttagatgacaatggtaagctcttggtactgtgcagatacctggtgtctgtgagagaggtgctgatatgtgcatttcttctgtgaaacagcaggttgtgcaaactggaatctgtaatgtctccacattctgtcatcagcagaagactctgaacatttttctaccgtttaaatgagtctcaattatccaatttataataatgcaaattttacttacagataaatatgggggagtagaggagggttgtgagtttcagccatgaaaaattcatggagcttaaaaattcctaagtatctcaccctgcaaacagataattatatttctaaaagtgtcttgacattctcattctcatgtactcacagtactcttctctatcctcaaagtttctgaattgcttctctgttcctgtctcctctgttattctgcctccctcctcccttccttgcctagtttaagtggatttttagcaaacaaaagtgttgactagaggctgtgagtgaagggcatttttacctcccctggcccccagtgtagattcctcttctgtctacacagaatccttcagatcaggataaaattgagccttccttactagttactacgatttttgaagaattggtgtgattgataaccacagcaacagtgtttggactttagagaaactttattcatgcccacactatgtctactgacctacattttgttacttaaattcattttaagatttctcttccaaaagttttccagttattctcctcttttgattcattgatcccctatatttttattttaccagtaatttcataacttctcttaatattaaaatattttaatgaatatttggaataaacgtatgtgtctatggtgaatactcactgggacacactatacccctccttcttccacaacctcaacctaaggaaggaacactgtctacaagtggtgaggatccttccagatagatttccattaatttacataaattttgcaagatctcccttaactcacctctgcttgacttactgctgagtaaattctttctccatattcccttcatgtaacgtgctaatcagtgaccataaatcacacatgattgttactggtagaatcaatgctttcaactccaacacgtctgtctccacaggttgatgtatatatttatcaacagggagttttctcctcccaaaagtaatgccatttgctctatttattcaatggcataagtggtttactgtaataaaaactactaaactataatcacaaaaaggaaaactttttatttttataaagcctaaataaaatgtgccagaaacaaaaattagagattctttaaaaatgctattgaggtaaaagtgagtgataaaagtagacctgtataaatacaagtctgtgaatattctgtactcagaattttgacatctttaagtgttttagcttactttaaagaactaccatgctgggcgcggtggctcacgcctgtaaccccagcactttgggaggctgaggtgggcagaaaatctgaggtcaggagttcaagaccagcctggccaacatgataaaacccgtctctactaaaaataaaaaaattagctggatgtggtggtgcacgcctgtagtcccagctactcaggaggctgaggcaggggaatcacttgaacctggaaggcagaggctgcagtgagctgagattgcaccactacactccagcctggccaacagagcgagactctgtctcaaaaaaaaaaaaaggaaaagaaaaaaagaactgccaattgtaaatttgtaaatcatgtttaattatagtttatgatagaaaataaaagaaacataaaatttcttacagaagaatttaacccataacaaagtttgagcaaagtaatacaagctacaattaaaataagtcatttcaatttcatttgaatgtgagccaaacattttatgtttttatttttttctcaggattatatctttttatatgttgtatttttttcttttatctggctattaacaatagtaaagtgattgataactttctcttttacattctatgtatttaaatatcttatttagattattttaatttgcaattatttttcattaatatttcattttattaaaaattgccttttttcagtgtttacatattaatggcttacttatccaagattgtaaaaatatacaaatatttttaccgctgagagatttggttttttgtttgtctgtttttgttttttgagagggagtctcactctattgcccagactggagtgcagtggcacaatgtcagctcactgcagcctcctcctcctggttcaagtgattctcctgcctcagcctcccatgaaactgggactacaggcttgagccaccacgcccagctaattttcgtatttttaatagagatgggtttcaccatgttggccaggctggtcttgaactactgacctcaagtgatccacctgccttggcctcccaaagtgttgagattacaggcgtgagtcactacacccagcctaagactattctttactttgggttttttgttgttgttgttgtttaacaggctgtcatttgtcacccaggctggagtagagtggcacgatctcagctcactgcagcctcaacctcctgggttcaagagatcctcctgcctcagccccttttctgcccctcaccccccacccccaatagctggaactacggacgtaccaccacttccagctaatttttgtactttttgtagagactggatttcatcatgtttcccaggctgtctccaactcctgaaatcaagtgatccgcccgcctcggcctcccacagtgctgggattacaggtgtgagccaccgcacccgggattgttattcttcactttgaatcccacatgttatttaaagctaagacctgaggcaaaaaaaaatcacttctatatttcaactaatactattttattactaggtaataagtcccaatatttacatttatgtacacatacacacacatttcctttctataccattaagataatggtagacctttatgtcaggaaaatgctataggctgggggcgagtggctcacgcctgtaatcccagcactttgggaggccgaggcgggaggatcacttgagcctaggagttcgaggccagtctgcacaacgtggtaaaaccatgtctctaaaaaaaaaaaaaaaaaaaaaaaaaaattagctgggcgtggtatcatgagcctgtaatcccagctactttcagctactcgggaggctgaggtgggaggatttcttgagcctgggaggcaaaggttgcagtgagcccagatcccaccactgtactgcagcctgggtgacaagagtgacaacctgtctcaaaaaaaaaaaaaaaaaaaagctattggtaattgaatttatctttattgaacaaatcctcttcattgcatgctttaaattttgatttgtttaaattttattgaattgtaataaaacgattttgaaattactagagaagcccaggcgctgtggctcacgcctgtaatcccaccactgtgggaggccaaggcaggcggatcacctgatgtcaagagttcgagaccagcctgaccaacatggtgaaaccccgtctctactaaaaacaccaaaaaacaattagccgggctagctgaaggcacctgtagtcccagctactcaggaggctgaggcaggagaatggcttgaacccgggaggcggaggttgcagtaagcagagatcgtgccattgcagtacagcctgggcgacagagagagtctccgtcaaaaaagaaaaagaagagaaaagaaaaagagaaaggaaggaagggaggaagggaggaagggaggacgagaggaagggaggaagggagggagggaaaagaaattcctgggcagatgaaagtgaggggtcgggggtcggggtcgggcgcggcgatgccgcagctgcggggctcggtggactcggcgagcaagagccccaggacgctgctggcggcgggcgaggagctggggcgcggcgcggggcggctctaggcgctgtggccgctcagcgtctgggacccagcgccgcccaggtcagggaatccttggtgttcccgccccgcagcacccggggcgggggaggagtcggcgcggtcgtgcggccgtggaggacagcgagacccggggctgcggctgcaggccgaggggcccctgggacagtgagaagcagcggcgggagctagtcacggggcagggagcgctcagcggtaaagacggcttcatctgactccagggctggcaggcggcccggatggcatgccgtctcctgcggagaattccaatttccccctaaatcgctcaacaagcgagaaggttttgggattcgaattcagtggggcaagcgaagtcgcctttccttcttaaacagatggaatccctggtccacaaacgtaccctgtgccaatttcatacaacacgctatggctgctgcggatgagaacacagcaactctgccagatgaaaagcttcaaggctctgtgaatccaaggtcaaaaacgccaaaaaggaaagtccttttccaggacaagcgcacgcgtgctggtcgtggagcgccccctcctcatggagaccggcctgggattgatgtccttcattaacaatgaggctaaactgggctattccatgactgaccaggggcaaaataggcttttagccagcggcattctgggagctctccccactaagaaggccaagggatgtggggtctgagagcctggcagtcctcatgcaaagccgctgctggctggaagcataggggtcttttaccttttgggatctctgcacgattagaatagtaaagtggatagtaattgcatattgcactctgctaatgcaagctacagacaaaagcaaaaagaatctagctgccactgtgctgctaggattccattttctgtaacttcagttctgatacttttcctggagtgtatctacttggcttctggcggttcttcccatcccagccactccagcaggctaaatcccgcagcacaccccttaccatttgtgtaggctgctaaatacagggaggcacctggtatctccagtgtctgcagacacaaatatgtttacacttggtgtcaaattttgtattttaaattttaatacttttttttttaaagctcatacaaaagcagccagcagacaagttcactgacatcagtctgcacctgtcagctcctgggtgaatcattgttcttttgtaaatgtgtgtttgacctaaagtcaccctttttctaaaattaatccaaggccgggcgcggtggctcactcctgtaatcccaacactttgggaggctgaggcgggtggatcaccagatcaggagttcgagaccagcctgaccaaaatggagaaaccccatctctactaaaaatacaaaataagctgggcagcccacgtcagtaatcccagctactccggaggctgaggcaggagaattgcttgaacccgggaggtggaggttgtggtaaaccgagatcgtgccactgcactccagcctgggcaacaagagtgaaactccgtctcaataataatactgatacttaaaatatctttgcgaggcccaagtaggtttacagaaaatcatcttaggacaattttttaatttgagaaagtcactttggcagttctttgcacacaattttgacaagtgtatgtattataagttgtattgtattcatatttaaaaggaaattgggtagtttgccttttgaagaatgcgctttttaaaaaggaaccatatcagatccttatgaagcagccgatgcctgccatggttcctacaggtcctgtacagactcggggctttgtccaagtctccactaaacatgctaagcttcgatgcgccctggagaatttccacggggtgatccacgcacctccatgagatcctgcagcttgcttgtatgactggaagcattggataagcttcgcgtgctggctctccagttctttccttctctttacgactgttgtagcttttagctaatggagtggtgcggtccaagtgcggccacctacgggaggtgcagggctgcctcggaagctggcaggggaccccagtctttgcgttcataaagacatttagaaccggatgaatgttgttccttttttgaagttgttattaaagtaggtgcaacaaccaaaaatcaataaataataaataaattgactaaatattttttctcaaaaaaaaaaaaaaaagaaaagaaagtcaccaggtgtggtggctcacgcctgtaatcccagcacctggggaggctgaggtgggcggatcacctgagatcaggagtttgagactatcctggccaacatggtgaaaccccgtctctactaaaatacaaaaattagccgggtgtggtggcgcatgcctttaatcacagctactctgggtgcggaagttgcagtgagccaagatcgtgccactgcactccagcctgggcgacagagcaagactttgtctcgaaaaaaatagaaagttaacagttttgtttattttcctaccaggtttttattattattattattattctaattgaaatcactgtttcctacatactgaggcggattggctttgtcttcttggaaacaaaggttattttcctcactcacactggagcggggatactcaccagacacaagttgagatgatgctggatgtaaacgggtcatctatttttaccaaaggcagcactacctgccttcccaattgatcagaaaagcatttgatagttgtctttgtaatatccttatttgattaaattactatgtggatttcacatttatttttattgttttgtgcctgtttattctatgcctaagttggggtatcaccaggtcatttcctccaccatctgtgtttccccaaggataaatcctcctgctcatgcccttcactcctccattagcccattccctagaaagctgctggttttacacagtggctgtgtgtctttgccttcttaatgtagcattcagagtcccactctggagccaggtatcaaatcctagcccagccacttacaggctatgtagcactggccaaggtactgaacttctctgtgcctctgttattttgatgttaaaatggagttatttaggatctactttacaggactgttgtgatggaaatgggttaacatacagaaagcactgagaacagagtcaaatatgccctgactgcttaaaggttagttattatgatccctgatgctattactactcttactgatatcatcgtgcctcaggtctaactgctcccagagttacacaccagcatgtccaacagctggctgtatatctgaactcaaaaatccaataacctcctccaaacagaaattgccagcttttccccaaaccttttccttacagctccttacagagctcaaggaactccttgagactgcagaagcagacaggaaatgctttcaacccaccacaaattaacaactggcctccagtggtactcacattgtctacatttttcattgttttttttttgtttgttttttgtttgtttgtttgtttgtttttgagacagagtctcactctgtcgcccaggctggagagcagtggtgcgatcttggctcactgcaacctcggcctcccaggttcaagtgattctcctgcctcaggctcccgagtacttgggattacaggtgcctgccaccatgcctggctaatttttgtatttttttagtagagacgaggtttcatcatgttggccaggctggtctcaaactcctgacctcaggtgatccacccgcctcggcctcccaaagtgctgggattacaggcatgagccactgcgcccagcccatttttcattgttgtagcagagaagtatccctgcttccatcaagagccaattttcctgtcacagttggtttaatgacatagttggtgacaggacctaaaccaccagtggaaaattggctcttgatgggagcagggatacttctctgtatggagtatatgtggatgaaactccttggagaaatggactagtacacagtcttataatgtgaggattcagaacataattcctaatgtggggaagtcaagcagacatttcatcagtggagtaccaggagattcaaactctgtacccaacagtgatagggggacaatctaagccccaagaggctgcatgcctgatggagcagatgaaacacatggctgtaattagctcccaccccttcgatacgttctcaactccaccaaagcctcagcctgtatgagggtggaaagtggggagggagagtgcagggaagaaggcacagcttccaccacactaggtgaccaggcgcttctcaccattttaactcctccatctctctcaagcctcatgttaagtctatcaaacatcatatgctttctcaatataaaatatgcaccaatttctccctttccactgatataatcctagtctcaacccctgtcatctttttgatggattaggaatgccttctctgggtcccgggccccctctgtttcaccagcctggaattggcacaggagtcacagcattagccttgccctctgccacccttgtaattcataaatctctgaaaacttaaaagtttgagcaaaagtttgtcatgtttctatgagtaatttataataaaacttgatcagaatttgtgagactaacgtttgtctttatattttccttttttttttttttttttttgagacacagtctcgctctgtcgtccaggctggagtgccgtggcgtaatctcggctcactgcaacctctgcctcctggattcaaacaattcttctgcctcagcctcctgagtagctgggattacaggtgcatgctaccacgcccagataatttttgtatttttaatagaaaccgggtttaaccatgttggtcaggctggtctcaaactcctgacctcatgatccacctgcctcggcctcccaaagtgctgggattacaggcgcgagccaccacacccagcctgtctttatattttcatttaatgtggaccttgttacattttaccgcagattttgtatttttgtgtgtgtttgtttgtttgttggtttttgagacagtctacctctgtcgcccaggctgcagtgcagtggcacaatttcagctcactgcaacctccgcctctgtggttcaaacaattcttctgctcagcctcctgaatagctgggactacaggcacgcgccactacgcctggctaatttttgcatttttagtagagatggggtttcaccatattggccaggctggtctcgaactcttgacctcgtgatccgcccacctcggcctccaaaagtgctgggattacaggcatggttttttttttgttcgttttgttttgttttttttttagagacttggtctccttccatttcccaggccagagttcagtagggcggtcataatccactgtagccatgaactccctggctcaaacaagctacacagacatgccaccatgcctggctaacatttttaacattatttttggtagagacagggtcttgctttgttgctcaggctagggattcacagagtcttgctctgtctcccaggctggaatgcagtggcgcaatcttggctcactctagcctctgcctcccaggttcaagtaattctcctgcctcagcctcccaagtagctgggattacaggtgcccaccaccatgcccggctaatttttgtatttttagtagagaaagggtttcaccatgttggccaggctggtcttgaactcctgatctcaggtgatctgcctgcctcagcctcccaaagtgctgagattacaggtgtgagccactgcacctagcctgcagaaatattaatgtgtttgtttatgacctgttgacccaggaccagtgatggtatagaacactgtattagagacatggagctggggctggatgaagattccatcagtaattcaatcaacagacaagtgttatccaatcacgtctttaaatcaatcactgacatggagctggggctggatgaagattccatcagtaattcaatcaacagacaagtgttatccaatcacgtctttaaatcaatcactgatcccagcccctataaaagggagcagccttaggaggcacatcagataaacccagtgtggaaagctagtcacacatcagctcagtgttcggcccgggattacccagtcaaccaaggaggtaagcttccataatggaaggaaaattttgtgcctttgagtgtgtatacattttgtgtctttgagtgtgtatacataattttgtgtctttgagtgtgtatacatgtgtatgtaggcatagctatttcaggaaaattcctaactacagagatatgggggtctcccaggtgtagggaatggtcttttgttacaacagctctgacccaaaagggcttgatgttgtgaactctgtataaaggcctggtgtgactgaagatttttcttcaaaaagtctatcgtatgactttatgttctagtaattcttttttttttttcgagacaagatctctatcacccaggctaaagtttagtagccccaatcacagctcactgcagcttcagcctccccaggctcaagtgatccttccaccttagcttcctgagcagctgggaccacaggcgcacaccaccacaccaggttaatttttctattttttgtagaggcaggattttgccatgttgcccagtgtggtctcaaactcctggcctccagtgatttgcccactttcagcctccaaaagtgctgggattacagatgtgagccactgtgcccagcttagtaattcctttgtattgcattatatgaaatatgtagctgggtgtcattagagatcataaagcccaggatacagacccagacctgacgggtagcatgcctgcgtcacagtttgtaattgccagactccagattagagctccggtagccttgttttgaattcccaggttctgggaaataagccataatactttgcagtcttgtctatgtgggacggagtgcatgtctccaagtgtgaacatgtggtctgtgtgtcataggggagaaagggtgggtaatccaaaaagagaacttggagggaagtgaaatgaaggggaagccatgggttccacaggaaaaaaaaaaaaaaagagagagagagagaccaatgtccctggatatagagaaccagccacaacacctaagatggagcttgagaagtgtagagctggcccaggaaagcctcgtaggacaaggactcagtgcttttccctgagggcaaaggggagccatccagagagtagagtggggtatgatgtgagcagattagcattttataaacgttgactggaagcattatgacaactgggttagggaaaggcaagaatgtgttccattgtctcctaggagattttaccaggatcacctctgccttattaactgatgcgatcagggtagcagatctggtctaatcagaccagatgagattaacacaaagcaggaaataacattaactaacagaaatcagttaggtttttgtgtgtccacgtattactcctaccattttctgattttatggcatgaaatttgcttttttcaaaattgcacaaatctttgaaatgttaaccatatataaaattggagaaaaaacacaaaaatagcaatgatatattaacagaaaagggattaaattctttatccattcaggatttcaaagggtgtgtctctagttgtccagataatctgatttgggattagaaatcaatttcaagcaatgcaaactcacttttacttctgaatcctaaacatcagtaggaaaggacagggagtaaaaacagataaacataaaatagtagctttggttaaagcagtaaagttctaaggaatggtaactgttaatgggaaaaaaattcaagcagaaaaggtgctaagaatgtttcctaaggaatgtatcctttcacaacacagtgggtgtagctggtagtggccttgcagatgtctgtgcctaataagttttcagccagagaaaggtgtcatttgtatggattctggcttgtcttttctatttcattcacttctttctctttttcttgttttccctagctttattgaggtataattgacaaagattgtatatatttaaggtgtacaatgtgacacttctctctctatatatatgtatactttgcaaaatgattaccacgatcaagctagttaacatattcatcacctcacatagttatcttttttttttttttttgagacagaatcttgctctgtcacctaagctggagtacagtggcgtaatctcagttcactacaacccccacctctcaggttcaagtgattcttgtgcctcagcctctcaagtagctgggattaccggtgcatgccaccacacccaactcatttttgaatttttaatagaggtggggtttcaccatgttgccaggctggtcttgaactcctggcctcaagcgatatgcccacctctgcctcccaaagcactgggattacaggggtgagccaattatcttttttatatcatgagaacactgaaaatctagcaaatttcaagcatacaatatatattagctatagccaccatgccgtacatcagatctccagagcatattcattttttttccctagcctgagaaggacatggtgacatttaattaattaatttatttatttatttattttgagatggagtttcactctgtcgcccaggctggagtgcagtggcacgatctcggctcactgcaacctccatctcctgggttcaagcgattctcctgcctcagcctaccgagtagctggaattacaggtgtgcaccaccacagccagctaatttttgtatttttagtagagaaagggtttcaccacgtctcatctcaagtgatacgcctgtctcggcctcccaaagtgctgggattacaggcgcgagtcaccgtgcccggccacatatttattttataaatgaaagtttgccataggcatagtagctcacgcctgtaatcccagaaaggctagagtgaggagcagtcacttgagtccaggagttcaagacaacctggacaaaatagcgagaccaagtctcgaaaagaaaatttttaaaaaattagctgagtgtggtgcgtgcctgtagtcccagctactcaagacgctaaggcaggaggatcgcttgaacccaggaggctgaggctgcagtgagctgtcatggcaccactgcactctagcctgtctgacagacggagaccctgtctcaaaataaatcaagtttgcaccatttgatcaacatcttcccatatgccccaccccatgcccctggcaaccacccttctactctcagtttctaatactttattttctgatgatgatgatgattattattattattattattattgagacagagtttctgtgttgcctaagctgaagtgcagtggcccaatctcaactcactgcaacctctgcttcccaagttcaacccattctccttgctcagcctcccgagtagctgcgattacaggcatgcaccaccacatctggctaatttttatatttttagtagagacggggtttcgccatgttggcaaggctggtcttgaactcctggtttcaagtgatctgcccgcctcggcctcccaaagtgttgggattacaggtgtgagccacagtgaaaagagtttttttgttttaatttcaactgcttgtgataacacaatattacaatattcagttcattttggtttattggcattgtaatagacatctccctaaattcacctaggctaatatttggtgaatattttattttattttagattcagggagtacatgtgcatgtttgttacaaaagtattctgcatattggtggaaattggacttctagtgtacctattacttaaatagtgaacattgtacccaatgggtaatttttcaatacccatttccctcccaactcccccgctggagtccccagcatctgttatttccatccttatgtccatgtgtacccactgtttagcttctacttataagtgagaacatgcggtatttggttttctgtttctgagttagttcacttaagataatggcctccagctccaactatgttgctgcaaaggactaatttcattcttttttatggctgcataatattccatggtatgtatttcacattttctttatccagtcaaccactggtagactcttaggttggttccatgactttgctcctgtgactagtgctgcaatcaaaatatgagtgcaggtgtctttttttatataatgatttctttccttttgagtagatactgagctggatcaaatgatggttctatttttagttctctgagaaatctccatactgttttccatagaggttaactgatttgcatccccaccaaatttattgaatactctttgtaaacaaaatcaagactctataaatatgtttgaaatattttctttccttatttcactggttagggagcaatccaatgtttcatagagatgatagctcaagcagaaaacttttaacaataaattttgttgtaactactttataaaatatttttcacatcaagttttttttttttttttttttaagagtctcactctgtcacccaggcaggagctcagtggcatgatcctggctcattgccacgcccacttcccgggttcaagggattctcctgcctccaccactgaagtagctgggtttacaggcacgtgccaccatacccagctaagttttgtgtgtgcgtgtggcttttttttttttttttttttttttgagacggagtcttgctctgtcagccaggctggagtgcagtggcgcaatcttgactcactgcaatctccacctcccgggctcaagcaattctcccatctcagcctcctgagtagctaggactacaggtgcatgccatcatgcctggctgatttttgtatttttagtagagatggggtttcaccatattggtcaggctggtctcgaaatcctgacctcaggtgatccacctgcctcagcctcccaaagtgttgggattacaggcatgagcaaccacacccggcaagttttgtatttttagtagagatggtgcctcaccatgttggccaggctagtctcgaactcctgacctcaagtgatccgccctcctcggcctcccacagttctgggattataggagtgagccactgtgcccagccaaggatatttcctaatagttctagtttattaagtgcctttttcaggaataaacattggcatttaaacattttaaatgcattcattgagatgattttattatgttcttgtatccatatcccgttaacgaagtaaattgcattgatttttgaattttaacccaaacttcctgcattttggaaatgaacaccatttgcgatgtatatgtgagtagattttattttcaaatattttgttttggataattttaatgtatttgtaaaattttgttatcaggaagtgctgacctcagtaactaaagtgggtagtgcttcctcttatatgctctgggagagtttatgttaagttataattatttctttgaattcatccatagagccatgtaggcctaactttttggttgatttgtctttaattatgccagtggtgcaattaattactcatctcttttctatttctagcttgcagttttaaagaatccaccaactgttgaaacaaatccctagagacacaaggcaagagactgaatcatcaaagtaaagtctctctgagaattattgctaagaatggctttagatctaagaaccatatttcagtgtgaaccatccgagaataatcttggatcagaaaattcagcgtttcaacaaagccaaggacctgctgttcagagagaagaagggatttctgagttctcaagaatggtgctcaattcatttcaagacagcaataattcatatgcaaggcaggaattgcaaagactttataggatctttcactcatggctgcaaccagaaaagcacagcaaggatgaaattatttctctattagtcctggagcagtttatgattggtggccactgcaatgacaaagccagtgtgaaagagaaatggaaatcaagtggcaaaaacttggagagattcatagaagacctgactgatgacagcataaatccacctgccttagtgagtacagggttctaacttctgggatgagagacaaaggaaagtaaggaataaatcacagtcagttagagttgtctggaagttagagaagctattggaggtccagttattagtcagctcacactctcccaccattctcacaaagaataatcttcaatgtcctaagttctcaagaaaaaaagcaaaaaggtatatatctgtttattctgtaggacatataggagccaaacatattgatgtttgattaacttaattttagtctgcataatggcagactctgagaaattgactttttggcatgatatcagctcactgcaacctatgcctcccaggcacaagtcattctcgtggctcagcctccagagtagctgggattacaggcgtgctccaccaaggccggctaatttttgtatttttaatagagacagcgttccaccatgttggccaggcggtctcgaactcctggcctcaagtgatccgcctgccttggcctcccaaagtgctaggattacaggtgtgagaccagcctgaaattgacatttaaatgaagacatcaaggttgaggaagaaatgtcttgacaagagcttgttcttctgtcagggaactctaatcaagaaagacattctaaagaagcaattacggtagatccttattctcagagcccatatttgcaaaattgctaaaatttatttgtaagcttaaaataaatacctgaggcatcttctccgtcattttcagatatgtgcaggtggtaaaatatttgatttaccttaggtgcatgtttccaggtgaggttgaacaaggccacaacctcacttcctattttggttcctacagtgtaaataagtgtccttttcacagtctatttagtggcacatttttttttttgctttttattgataactttgttgtttaaagtgacactgaagtaaaatgctgaaacactgtctagtcttcctaagtgcaggaaagttgctatgtattatggagataatacatgtgttggatcctctgagttcaggattaatcaataatatatattaaatggggtgtctttgaacatatacacacataaaacaaactcatgtattgatcagttgacaaaaataatgtagccagaagctcacaggaaactaaccctgaatttttcctaggggaaatgattcagtacttgtaaattcaatgtccatgtgactttattaaacataagagcttgtagtaacaagaataacaccatcagagatggtggacaaaatatgtgatagccaatacttgagggagcttgtgagagcctgttaaggaccacttttccaaaaagtcttctgttacacaacagattcagatacaacagtgatctggctttctttacaggtccacgtccacatgcagggacaggaagctctcttttctgaggatatgcccttaagagatgtcattgttcatctcacaaaacaagtgaatgcccaaaccacaagagaagcaaacatggggacaccctcccagacttcccaagatacttccttagaaacaggacaaggtaagtcaggtgaatctgcacaactgaggagtgttctatgtggaccccttcttaagtacaacttcattgagtgtctattttcacaggatatgaagatgaacaagatggctggaacagttcttcgaaaactactcgagtaaatgaaaatattactaatcaaggcaatcaaatagtttccctaatcatcatccaggaagagaacggtcctaggcctgaagagggaggtgtttcttctgacaacccatacaactcaaaaagagcagagctagtcactgctagatctcaggaagggtccataaatggaatcactttccaaggtgtccctatggtgatgggagcagggtgtatctctcaaccagagcagtcctcccctgagtctgcccttacccaccagagcaatgagggaaattccacatgtgaggtacatcagaaaggatcccatggagtccaaaaatcatacaaatgtgaagaatgccccaaggtctttaagtatctctgtcacttattagctcaccagagaagacacaggaatgagaggccatttgtttgtcccgagtgtcaaaaaggcttcttccagatatcagacctacgggtgcatcagataattcacacaggaaagaagcctttcacatgcagcatgtgtaaaaagtccttcagccacaaaaccaacctgcggtctcatgagagaatccacacaggagaaaagccttatacatgtcccttttgtaagacaagctaccgccagtcatccacataccaccgccatatgaggactcatgagaaaattaccctgccaagtgttccctccacaccagaagcttcctaagctgctggtctgataatgtgtataaatatgtatgcaagtatgtatattcctatagtatttatctacttaggatataagatataatctcctgattatgctttcaatttattgtcttgcttcattaaaatgtaaggctaaggagagcatggaatttgtcagttttgttcactaaagtattccaagtggttgggaaagtggaacatttccaagaaccaataaatttctgttgaataaatgaatgaatccataatgttgatatccttttttaaaaaaagagatggggccggccgcagtggttcggcctcccaaagtgctgggattacaagcgtgagtgaccgtgcccggcttttttttttttttctgagtcagagtcttgatctgtcgctcagactggagtgccgtggtgtgatcttggctcactgcaacctccacttggaggtccaaaattaatcatagacaccaaaccacagatccagaaatctcagagaagaggaagcagtgtaaataccaaaaacctacaactaggtacatcatattcaaactacagaaggccaaagatagagaaattcttgaaagaagatggaggtgggagagggcactttacctgctgaggaacaaggatgagatttagagtagaattcttgtcagaaaccagataatcaagaagggaatggagtgaaagttcaaaatttagtacaaaaaataaaaccccaccctaacatctatatccagcaatgttatctttcaaaggtggaggagaataaagcttttctcacacaaatactaaagaattcatccccaaaggtcctgttacagggtccctgcattacatgtgaagcaatccagtagttatttgaaggtcgaattagattaaagatgtttaggctgggcacagtgtctcatgcctgtaatcccagcactttgtcaggctgaggcgggcagatcacttgagtccaggagtttgagaccagcctgagcaccaaggcaaaacctcatctgtacaaaaaatacaaaaaaacaattagctaggtttggcgacatgcgcctgtaatcccagctatttgggaggctgagatgagaggatcacttgaacctgggaggcagaggttgcagtgagctgagaacagaccaccgcactccagcctgggtgacaggctcaaaaaaattttaaaaagatgtttattgtaacttctaagggaggaattaatatttttttttttttttgctggcaactttgattaatttaaacatacaaaaattagctgggcatggtggtgtatgcttgtaaccccagctactcaggaggctgaggcaggagaatcgcttgaacccgggaggcagaggttgcagtgagctgagatcgcgccactgcactccaccctgggagacagagcaagacactgtctcaagaacaaaaacaaaaaagcccaggcgcagtggctcacctgaggtcaggagttcaagaccagcctggccaacatggtaaaaccctcgctctactgaaaatacagaaattagccgggcatggtgctggcgcctgtagtgccagccacttgggaggctgaggcagaagaattgcttgaacctgggaggtggaacttgtggtgagccaagatcaagccattgcactctagcctgggcaacagagtgagactccgtctgggaaaaaaaaaaaaaaaaagaactgataaacaaattcacctgtgtagctgaattcaaagtcaacatgcaaaagtcaacatgtaaaactcatatgcccttccatacactaacaatgaaaaatctgaaaaggaaattaagaaaacaatatcatttgcaatagtaatgtatatggtcaaatgatctcaacaaggctaccaagaccactcaatggggaaacgatgatcttttcagcaaatgatgctgggaaaatgaaatattcacatgctaaggaatgaaggtgaacccttacctaacaccaaaaacacaaatgaactcaaaatggactaaaaacctaaacataagacccaaaactataaaacacttaaaagaaaatatagggtgaaagttttatgacattgaatttggccataatttcttggatttgacaccaaatacacatgtgacaaaagaaaaatagaccaattagacttcatgaaaattaaaactttagtatatcaaacaataacaaagtgaaagaggaacctatttaatgagaacaaaatacaggttgaatatccctgagccaaaaatctaaaatccaaaatgctccaaaatccaaattttttttttctttttttttttttggagacggagtctccccctgtcgcccaggctggagtgcaatggcgtgatctcgactcactgcaacctctgcctcccaggttcaaacgattctcctgcctcagcctcccaagtactgggattacaggcgctcgccaccatgcccggctaatttttgtatttttagtagagacagggtttcaccatgttggccaggctggtctcgaactcctgatcgcgtgatccacccaccttggcctcccaaagtgctgggattacaggcgtgaaccactgcgcccggcccgcccgactaatttttgtatttttagtagagatggggttccgccatgttggccagcctggtctcgaacttctgacctcaggtgatccgcccgcctcggccttctaaagtgctgggattacaggcgtgagccaccgcgcccaaccccctgaaataatatttgtttgcctctaggggcaccctgagcttcgtggagtctgaaataatgtctctaaacacttaagtgatcagttacggaaaacacttcccagaaatctgggaaaagcccctttaagaaggagtaaatacctccttctcccctagaggccgaagtcgccatttccctgcacggggcacagcacctcagaatacaagttcgcagaggtcaaagcagtggacacactccgaagagctccgtggagttttggaaactacattatccagagtgcagagcgcaaaacggcggcggagttgagccaatgacagcccaggatagcaacacttccgcgcacgcgcagcgcgacgggccggaacttccggcgtcctcctcgtggcggtcattttggcctctgtcctgtttgtccagcccgccagtttctgcagtggaggtcgcgactgagggacgggacagagaagtcgcgaaagtgggccagaggttctgcgacaccacctcgggtgagctgcgccaggcccgggatagggactgttgtgttcgaatgcccgccccggtcggccgccgctccccgcctagtccacggagctcaatggcggcagtcgcgctgagggactcggctcaggtgagttgtgcgtcctccgggtctcgcctacctcccccagcagaagccttaaggcccagtgagggatgcctgctcacagccctgcagcccaggccccagtaccctggacaagaaggcgcttgtggattggacccgtttgtgacgcccagtgtgtacggaaatgtgacgggcagttgactggcgcgtgcagaacttggagctgcgactaagctgggggggattcaggagcctggggtccgtctcgggtctgcaggaacatagagtgaggcagagttgcacctgacgaatttgacgattctgaggacactggcagccttcgagatttgtgaacagatagggacactgggctaggatttcctaaagctatccaaaagttgctcaggggaagaacaggctgaagagaggtaatagtagttaggcataggaagactgagttcttgtccaagctcacgcagctggtaaagtcagcactgagaactgaggtgcggagatagtgcagccagcccaggccacctggctccaaaactggaccagggtcattgggcgacctgagcctcgccactcgtctagccttgggccctgagactttgagcaaatacaaagcccagagtcttaagtccaggttagattatatgaagctgttggcagccgggggaaaggagatgtagaaggttgtccaaggcaaagttaccagtatatgctaagtttggagaggaggctaagatagttcaggaacctacaattattttcttttcatgagaacagggagcagtgtagtagaagtcagacccggaatggttccctgagaagttgagttgtctattcgttacttaatagtaacagtgggaggtttggagtggaagagggaggtgatctggttctggtcttattaggctccctgtggctgcagcatgggaagccaactgaaggatgaggtggggagacctgggaggagactactgggataggccaggtgaatgtgatagaatgtgataggccaaaatggtggctgtgaagatgcgagaagcagttggattctggattcattttttaagtagggctgcctgaatttttagttttgagaaagagagtggagtcagggatgactgaaaggttttattttggcagttagaagtgtggaagctccatcaactaagatggggaagtacatagtaggagtagttttcatttgggatatcagaagttttatttttgacctgctaagagtatgagagctttcagagaatggttcatgggctgctggaactgtaggtcaggaacagtgaggagagattcagaatggagacttttccaaaaggtagtggacaatctgtgggccggggtggagctgtggatcacatttagtagaggggaagcctgctcacaatgataataatagttgtcaaggaaggggaggggaaggtcaaggacaggtctcctgtgtgagcccctggttgtgtgaggtgttgcaacacaggtcttggacagaagtgttcacggtgagggtcgtacagagattatgatctagcatgtggccaaggcttctcaggggtgagtagacatgagatgaatgtagaggcataggagttagacaggatgatgctaggactggtgcgtattcacctctctgcagactgaccagggttttatattaactcttggtgggatctgggaagtttcagtcaggctgtcacgttatcttaggggcataattggccatctgtgggactcgatgggcccggggtagagagccactggggttggaccttgaattagtggtagttggagagaggaaggctgtgactggttgggggacagcaatcacagcccagaagtggaagaggccttggttatctgagatccacaggtgattcttgatgggtgaggttgaagcaaggaatagtcaggtagaaaggccttcatggtatgacttgaggctgcccctaactttaggtgcagttagagatctgggatagtactgaaccgtatttgaatttgccagccactctctgggccccatatgctgagtaaccagttgggaggccaaggagatgctcatggtatgaggcaggaagtaagctgtggctgtgggagtgacactgtgagagaagtgtggtagagtattgtgcacatggagacaagaatgtgaagtggtggctccttggtgttgaggacacaagggtgaagtatgaaccaagacccttggttgtgtttgggagccatggtctgttgtcttccaggagagtttccttacaagagagtatggttccttgcatggcaggctcagagcttagatacttgcccacctgcctgttgttgctgtgggagaacacaatgaccaatgggaccataaggagagagggggcattagtgtcaccaggccctgttgcattctttcaaatgagaagatggagaggaggatgaacaggggatagatgcagcagggatgaatttggggtcctaggagagatactcataatggaatgaactgtcccaatcatggaaaagctgtgtgacctttgaggttgtggctgtgggaatgcagctgtgtgagacaggtgtggttcaaagagtgatgtacatgagaagagagagaataaactgagggccatatgggtgaacgggagtcagaggggtaaagggtaagcccgtgttagttgtgtcttggaagatcaatcttggggacttcacgggtattgcctgacaagacaaacgtcagatcactcacaccctgtctatggccagttctctctctagctggtgtttgtgagtaacgagaggtatagcctacctgccatgcccagagcttagatagcatctatctgttcataggcctgttgttgctattcgaggactcagtatcagtggaactgtggggagagggtaggcatcggtggcactgtggctggttatctccgctgaggtgggcaatagggtgacctggggatggatgttgggggcaagaggataatgaactccgggtctgatcgtggattgaactattcctgctgtgacagggtatgacctttgaggatgtggccatttatttctcccaagaagagtgggagctccttgatgagtctcagaggttcctgtactgcgatgtgatgctggagaactttgcacatgtaacatccctgggtaaggccctagcatccctccgagtgtctgcttttctttttgaccccagagttacctctgtctcaggagtcttgctgtcagcctagtggatcttatttttcttgtcttccccctgtcaggatgactgtgtacagattcatggtaccttgtggcccagtttctgcccttttcctctagctgccatttccttatgtccacctatatcagaaattacaggcattgtcatagttactacttatgtgaactatggagctctttttacaagactctcctttgagtgttttttgtgagtgctggtcactcccttgtcctctctttccttaagacttacatcattcatgtgttatgtggtagcacaatgagggctgcagggagagccctagttgcttcacagagtgaacaaagcaagatggtctcagaggaggcctggccccagtgagtggcagctggggaagggcatgacatcatggttgtattagaatcatatccggaacctgtgatgtgtccagcagtattttggtgcaagtgccactggccataactcgtttctacttctacttccctatacaatactgtgctgaattgttgtttcatctgtcacttccagtgtttggctacctccaccctcgtggtctcagtgtgtcacttgttcgtctccacagctcacttcttttcagtgttgttcagtcttgactcactgtgttgtgaggtatgcacacagcctcaaatagtcctccttgatcaccagctatcaagtttcaattggattttcctaggactggacaacagcagtcttctgtacagcacatacatcactagcagacaaagtcctgctgagggctttggcagagagtgagttggagaccctccttctcctcctgtgctatacctcatccttgtatcctttgcgtgatgagatgacatctctaaaatcttaaaaaacccagtacttcaaaccagcctattcctccccagttccgttgttctcagaacagttccatgcactcagttcttgtgtctcacacatttttgtgatacatctttctccttccatgaaagtcagcatgcatttcatcagcatttctctgctttcaggttattgccatggaatggagaatgaggcgatagcttctgagcagagtgtatctatacaggtcaggacttctaagggcaatacacccacccagaaaactcacctcagtgagattaagatgtgtgtcccagtcttgaaagacattttgcctgcggctgagcaccaaaccacatcccctgtgcaaaagtcatacttgggtagcacaagcatgagaggcttctgcttcagtgctgaccttcaccagcatcaaaagcattacaatgaagaagagccctggaaaaggaaggtggatgaggctacatttgtgaccggctgcagattccatgtgttgaattatttcacctgtggggaggccttcccagcccccacggacctactccaacacgaagccactcccagtggtgaggagccacacagtagcagcagcaagcatatacaggcatttttcaatgcaaaaagttattacaagtggggtgaatacagaaaagcttcaagccacaaacacacacttgttcagcatcagagtgtctgttctgaaggagggctttatgagtgtagcaaatgtgagaaagccttcacttgcaagaacacacttgttcagcaccagcaaattcacactggacaaaagatgtttgagtgtagtgaatgtgaggaatcctttagcaaaaagtgccacctaatcttacacaagataattcacactggagaaaggccttatgaatgcagtgatcgtgagaaagcctttatccataaatctgaattcattcaccaccagagacgtcacactggaggagtgcgtcatgagtgtggtgaatgtaggaaaacctttagctacaaatctaacctcattgaacaccagagagttcacactggagaaaggccttatgaatgtggcgagtgcgggaaatcctttagacaaagctctagcctttttcgacaccagagagttcactctggagaaaggccttatcagtgctgtgagtgtgggaaatcctttagacaaatcttcaatctcattcgacatagaagagttcacactggagaaatgccttatcagtgcagtgattgtgggaaatcttttagctgcaaatcggaactcattcaacaccagagaattcacagtggagaaagaccttatgaatgcagagaatgtgggaaatcctttagacaattctctaacctcattcgacaccgcagcattcacactggtgataggccttatgagtgcagtgaatgtgagaaatcctttagccgcaaatttatcctgattcaacaccaaagagttcacactggagaaagaccttatgaatgcagtgaatgtggaaaatcctttacccgcaaatctgacctcattcaacaccggagaattcatactggcacaagaccttatgagtgcagtgaatgtggcaaatcttttagacagcgctctggcctcattcagcaccggagacttcatactggagaaaggccttatgaatgtagtgaatgtggaaagtcttttagccaaagtgctagcctcattcaacaccagagagttcacactggagaaaggccttatgaatgtagtgaatgtgggaaatcctttagccagagctctagcctcattcaacaccagagaggtcacactggagaaagaccttatgagtgcagtcaatgtgggaaaccctttacccacaaatcagaccttattcagcaccaaagagttcacactggagaaaggccttatgaatgcagtgaatgtgggaaatcctttagccgcaaatctaacctcattcgacatcggagagttcacactgaagaaaggccttaaatgtgaagggaatgtgctatttctttattcagtataatagcactggaggagactgtggtagccatcttcgtaaatttaaactttgagcacccacagtggggtattcttcataagtttcaggtatgtgggaagctctgaggaggttcattgtaatttctaatctgccgaggcctatagcctgatttatgtcactgccaatttctgaggctgaagccatttcacatttcacccctaccacctggcaggtgcacaccatgtgcatgagtcacttccccacagtgctcagagaagcaaacctctgtactctcccatttgcttggggaaattattaatagcccaagcatgtagggtcttcatgtcttttctctgactttagagtatacacctgacccagttgtggtccagagaatctgagttgtgctgtcagctttctaaggattacttttttaaggaacattgtcggtctcacatgatgcttgtaatgaatttttccacattctgattcaccagcctggaaactgcttggtgcacattgctttaatttataatgtttttataaaggttttaaaaaaatttacgcacctttaatcttgggtgttctattcattgcatagaatgacttgtaagcagaatagtgatgtcagcatgaaggggtgaatagattttgtggagatctcaaactttctgtactcagaagggacaatgtgatggcagaagacagctctttgttctgtattgctctaattggcctgctgcccaaggcctcaaagtaaagactgccaggctttgtgttcctgtattgtggcctggtgccatttttgtcaggtcagaggtcaccatgaaaaggaggcagttgtgacaatccccagtgcttctgtgaacgtgaattttgttcagttgtccacaggagatccacataattcctagcactggtgaggggaatctgttgcccaggtcctgcaaaggagccaggtgccatggcatataagtcagtgtagactggtgccatttgttgtcagactataggtgtggaggtgaaattacaggttcaacagtaattgggacagaaactccaggtaaatggggagtggagaagactgcagtaaattagatggaatgactcttctaaaagttcatctacaaattttccagtgaatatggttgtgtaggatcagtgcatacagaaattctcaggatcttctgtttactatcgctgagatcattatcagaaaatagtctggccgggcatggtgtaatcctaacactttgggaggccaaggcgggcggattgcctgagctcaggagttcaagaccagcctgggcaacatggtgaaatcccatgtctactaaaatacaaaaaattagccaggcgtggcagcatgcgcctatagtcccagccacttgggaggctgaggcaggagaatcgcttgaacccagaaggcggaagttgcagtgagctgagattgcaccactgcactccagcccaggcaacagagtgagactccgtctccaaaaaaaaaaaagaaaatagtctataaaggttttgtggctccttgtatcctgtctgggctgttcacctcaaggccattgctatgcaggtaggagaacaagaatagagagaaggatcattccgcggtccagggatgtggcttttgtgactcagccaacattcctattaattcaggtggcaacagccttcattgcttgccaaaatttgctgcccctgaggcaaggttgcctctctcagggcatgaggagagagagagatggtgaagtccatatcaggttgccaccctgattaaaaaaaaaggaacatctaggctcttaattttgagccactttttaaagctttttgaaggtctaatttgtataactgacatgcaacaaagtacacgtatccaaagtgtacagtttggtaaagccatgaaaccatcattacaaccataaaaatgaatttgtgtgtcacccatatatttaccttgtatctttttataatctttctcccttccccagctcttcaggttcaactgatttcctttacagtaaattagtttgcattttctggagtttttactgagatacatacacacacacacacacacacacacacacacgtatacgcatatacgtatacgtatatatatacatatgtgtttatatatgtgtgtgtgtatatatatatacttactggttttcttcatgctgtataattattttgagattcaaaaatgatgaatctttgtattgctgagtatcatgctgttctatggataagtcagtgtttatccatgtgtttagggacatttatattatttatagatttttgtatattacaaataaagctgctgtaaatacttgaattcatttctttatatggatatgtgttttattttcctcgtgttaataactcaaactgtaatgtcttagttacaatgtaggtgaatgtttaacattttaagaaatgccaaatttgatctaaatggatgtttcctattgtagtcccaccaagggtgtatgagagtcccagttcctttacatccctgccagtgcttcatgtggctaatcttttttattttagctctttgaatgtatgaatagtggtatctcactgtggttttcattgcatttccctaaaacttcctgatattgagcattttttaatgtttttatttgccacctgtgtaacttctttggtaaaattaaattttcttttaaaaattcctcaccacccattccagaatttgcatgtatgtgtgtgtgtgtgcacgcgcacacagacagggtctcccaggctagtcttttaactcctggccttaagcatttttcctactttccagccccagctgtggtcaatttgttttttcttttttttttggggggggacaagagtctcactctgtcacccaggctggagtgcagtgctgtaatctcagctcactgcaagctccgcctcccgggttcaagtgattctcctgcctcagcctcccaagtagctgggactacaggcgcccaccaccatgcccggctaatttttatatttttagtagaaacagtttcaccatattggccaggctggtctcaaactcctgactttgtgatcctcctgccttggcctcccaaagtgctgggattacaggtgtgagccaccgcacccagccaccgtggtcaatttcaaactgccatattgatgtcactgaacctggagttgggaagaatttctggtaacacacctttgtattctgtttccaatacactggtagagtatccaagatagccagaagaataaagacgacaataaaacagtaaaatgatcaggaagtggcaagttttaaatatttgttttttaaacaattttattgagatataatggacttaaattgtatgggtttttatctttcaccttagaagggattcagttgtatatttttaaaatatatattttgatgtttttatacatcgtacattcccaaaaccaaatgtttcttccagcccttttcaatttatcctttgcaacatataaattactgatagaaggacatattctgccttttgtaggggctatttacaaatgtccatcaatggaagacatcattataaaacctgatgaaccctttcccagtcttctatcatttatctttttttatttttatttttatttttttttgagacagggtctcgttctgttatccaggctggagtgtagtggtggatttatcattttgtcattctcttttttttttttcagcataaactatcaagcaattcatggttgttcttgtttcatctgtccccatgtggatttataatcagatatttcgttaaaggcataaagtcttcagattgcatttctaaaatttaaagaccgtttcgtaactataagattaacatacaaaataaaaattgtatgtgtacaaaattataaatgttttatatacagtactgaattgtatcaactgctgcttatttaagacagattgctatcagcatacaaaatatatttgatgtttagtaggtgtgtctttgagtttattaacctatacgtactgcttacttctttaatatttatgtaacgttgctaaactgcttgtccattagcttcccacattgtgctgggcgcagtggctcatgcctgtaatcccagcactttgggaggccgaggcggacggatcacgaggtcaggagatcgagaccacggtgaaaccccgtctctactaaaaatacaaaaaattagccgggcatggtggcgggcgcctgtagtcccagctactgggaaggctgaggcaggagaatggcgtgaacctgagaggcggagcttgcagtgagccgagatcgtgccattgcactgcagcctgggtgacagagcgagactccgtctcaaaaaaaaaaaacaaaacgaacttcccacattgttgatttggcttattaaatctcagattctgttcagtgtgttcaccgctcactccgccccccattccccagtatttcctgtatactagatattgatgaaatgagtgattaagatctgttccaagtggacaggtttatgttggtgacaaacctggaaacacagtgtgccttttgctaccacaacatgagcagcctggaaataaacattacaggtattgtgtgtgctggttgtgagacaggtgtgcagtagtgacagcacatcctagcaagatacacatacatctgtggcatacattgacagatgtaggaaactgacaccccccagcacagcctggagccatttgtgtatgccacatccgcaacagaaaagatgtatgacaaacctgaaacacacacacaggtatgtgcaaaacacgcaaggatcctgtgagacgggatggagatactgacacaccatagcagtctccacagagacttgtgggacggacatatgctagggatacccaaaaatctgatatgtggggccaggcgcggggctcacgcctgtagtcccagcacactgggaggccgaggcggacagatcacaaggtcaggagtttgagaccagcctggccaacatggtgaaaccccgtctctactaaaaatagaaaaattagccaagtgtggtggtgcgcacctgtaatcccagctactcaggaagctgaggcaggagaatcacttgaacctgggaggcggaggctacaatgatccgagatcacgccactgcaccccagcctgggcaacagagcaaggctccgtctcaaaaaaaaaaaaaatctgatgtgtgggccacaaacacaattgcactatctttgtggggcaattgtgatgaggcaggcacaacctgatgtgatactactactccctacacacatcactgcatactagatgatgtactgatgagggaactggttcataccccagcacaacctggaaatacacgtgtgagcaggtttgacctaagcaggagaataggatgtttatgggctttataggagggctcagccagattcagccagtttcagaagtaattggtcaagtacaggtgggagaaggaacactctaggggattagtactcattgtctgtcattgattttacacagggctggggaggagcagttgggactaaggacacctgctacaggggttgggaggcaaaagccatgggtacagagacgcgcgatggtcacgctggacattctcagttcttcatcttctctcccaatgtctgcagtagtgactgataactgagtgacagttcagtatggtgtggaggaagcatcctatggtggtgtttagatggaagaccgaaaggaccccaggaatgaatcattgcatggggttgtgagagagcgatgtgtttggagtgacaccagggaccctgttggaggtgttcaggcagtggcaatgctgaccatgggaagcaagtttgtggagaaggacttgaggccccaggtggcagtgtcccagtgtggttactcatgttctgggcttagcagacttggcagagaggaatctgtccagagtctcctgcatttccagtcagaggagtaaagggaccaaggcaagccaacccagttcagcgtagacctcagctgcttgtgtgagaaacacactcacccatccaaacccaaagaatggactaaaagacacgaagaacagcgaaagtgagactttcagtaacagtcttgcaagatcaggggactggtgtaggcaggcatatctagggtagtcacaacaggtaatttatctccttgcttgcaagtccctcctccaagatactcattggtccagtactatgaggttacagtcttcccagatgtcgtctaagtttcattatcccccttataacgttaaaccccggtccccttccctgcttaagttttgatttccaataatgaaacattcttccctttcatggcctgacccctcctctacattctgtgtacctattgtgaccttctagatgcatgagctgtgtggtttgttacatttgcaggctggctgccagtacttagatttatcatgccttgaaaatgggctatttaaaatattttcccacccttggcagctgtggtcgtgtatggatgttgcttgccctctctgaactgcagatacattaagagacaggaatgatcattcctctctactctttttggggggaagaaggaataagtaaggaggtaatccttaggaagtgggtcaatattagctccacatgaaaacagtagtcttggccaggcgcggtgactcacgcctgtaatcccagcactttgggaggccgaggtgggtagatcacctgaggttgggagttcaagaccagcctgaccaacatggtgaaaccccatctctactaaaactacaaaaattagctgggcgtggtggtgcacgcctgtaatctcagctactctggaggctgaggcaggagaattgcttaaacccgggaggcggaggttgcagtgagccgaaattgtgccattgcactccagcctgggtgacagagggagactccatctcaaaaaaaaaaaagaaaaagaaaaagaaagaaaagaaagtagtagtcttgattgtcagcatccagggaaatgtgcaaaccattctcgtctcagcctcctgagcagttggcactacaggcgaacaccacgatgcctggctaatttttgtatttttagttgagacagggtttcgccatgttggccaggctggtctgaaacttcaggcctcaagtgatctaccctccttggcctcccaaagtgctgagattacagatgtgagccactgtgcccagccggaattccttttttttttttttttttccttttggagacggagtttcttgttgcccaggctggagtgcagtggcactatctcagctcactgcaacctccacctcccaggttcaagcaattctcctgcctcagcctcctgagtagctgggatcacaggcatgtgccaccacacctgactaattttgtattttagtagagatggggtttctccatgttgttcaggctggtctcaaaactcctgacctcaggtgatccgcctgccttggcttcccaaagtgctgggattacaggcgttagccaccgagcccagcctctttttcccttcgttttattctaatcaaccactgaggttcaaagagggtctctagtcactaacccagccccgccccagcccactcagcccctgtccctggtgtgagccaccgcgccgcccagctggaattcttcagagtagaaaaaagggaaggctttaggtgtgctaattggagtctgtgggtctgaggaagccgaaggcaggctaactacaagtagggcctactctgtcattggttagggacacatacttgatttcatccatttgttcttaaattggaaagggagacaaacattagagaagctgttagtcaagtccttgacaggggttgttggggactttctcaaggtcacttccttgggaaggagtccttcagaaattcacactgagatctctggactctgcagccagtgcttcttccaaaaattccatccaagtagaagctgtggggtcagggggttctaagaagccccatttctctttctcttgtaccttaagacctgcctggatcaggtaaatgataaggcatcaactcactaggtgctggggatagtgctcggccctgcttaccacctgcctaccacaccttttgccaggatcccagagagtactgtgagcactcctattccacaaacataaaactgaggtaccaagaggctgcaaaaccagcagagtcctgatgctgggcagtggcagaggagggattaaacccaggcagcagagggagcagagggcctggggcagccaggcaccggaagtgctgcaagcaccaagacccagggtggtaacttgcagggggaggccagagcatgaaggcagagggaggttttgggtgcagcctccaagtagggaatggacagtttcagtgttgaggcagagtggcaaagacaagagacccacagcacccaggaaatccctcagctataaatacagtccctcagcacttttcactccccttcccaaggatactatcatcaccctctcctcaccttggaaagaaatcagggctccaactagagctgccttgctggaagctcgcactgtcctgtcccgatgtatcatccagcagccccaaggcagctcccctcattatcctctgtcataaagatatgatgtttgcttttcctctaggtaaagccagtaaggtaatagagcatcacctgttaggatgaactatgtgtgacaaatggtgctgtcaaattcgtatttgaggacttgttgttgtttatcttgaaaacgtgtgtaatgggctacatctgctaggccatatgaaggagtgaggcttttttcttaccttgcaatttcttagtggattgtctgtgatgtgcatcacattctggtttaatgcttaataaaagcgttttctgtctctaccttcgtggagaggatttctgggttgggagaaggttttgtatttatttcactgttgccatcacacacctgtctgctgggacaaaatctcaatcaccgatttcatcaacatctagtgtacaagttaaacaatgttagagattcaataagccacatctagaatacagcaaattctaattaaaaaatgactcagcaacttcaagaaataagaaaacaaaggtaaatggaacctgtaggttacagacttatgagatacaactactgaaagctattaaatatacatttggatcctgaataaaaatgatcttccttaagaaacacattgttttagacaactgagaaaacagaagcgataaaatatttacattttaaaatatatttgtgtgattttttggggggttataaaagagcctttacattttaaaattgcattctgaagaggctatgcattaaataatatgatatccgggagtataagtaaaataacgcactagtacacatgaggaccgatgaaacataaatgactatgaaatgataaatggtgaaggaaaaaaaaatagtgaaggaagactggagaaaggttcatctggcttcataacagtcttttccatctttttttgtaattgaacacagctgtaacaggagacaaaatatgtcattgtaccagtaattttacacaatgaaaattaattttatatgttgagaatgaactaaaaagacagaaggaaactgcgttccagggtgtaagcatgtatgaaaatatcaaaatatgcattttaaatataagcactttaagttccattatacctcaaactactttaaaaaactactcaaaatatccataacaaatgaatgaatgaataaacgaatactggtatatccacagaacatcatacttctcagcaatacaaaaaaaagaaactactcatagaggtataatgatgaatctcaaaataaatacgtgactatacccagggattaaaaaagagtaaatacattatggtttcaatcatataaaattctagcaaatgaaaactaatgtattataatggaaagtaaatcaatagttgcctataggcagataattattaaaggacaatgaggtaacttgtggaatgacacgttcattgtcatgattgtgaagaaacaacttcttcctaatcatttcactacattttattttctacattcttgaggttattcgtggccactgtatcagtatggtagaaacagaatatattaggatgctatcagcaactcttcccaattctacattcagtaacatgttggcagtttcaaaattggcatggtgggagcaattacaggttaatatgaatatcaaagctgatcaaattatatagtttaaatatgtaccatttattcttattaaaattattatcaggttagtgcaaaagtaattgccgtttttgcatgttggattttgccattttatattggaaaacattcttaaataaatgtggttatacatcattttaataggcatttctcgctttatgtttttttgctgacttactacttgctgtttatgtttattttagactatggaaatgttagacaaaactcaaatttcagcgatttttttgagatagagtcttgctctgttgcccaggctggagtgcagtgacatgatcttggctcactgcaacctccacctcccggggttcaaacaattctcgtgcctcaggctccccagtagctgggattacaggtgcatgccactatgcccagctaatttttgtatttttagtagagacggggtttcaccatgttggccaggctggtctcgaactcgtgacctgtgatccacccacctcggcctcccaaagtgctgggattacaggtgtaagccaccgcatctggcctcttttttttgagacggagtcttgttttgtctgtcgtccaggctggagtgcagtggcgtgatcttggctcactgtgacttctgcctcccgggttcaagtgattctcctgcctcagcctcccaagtagctgggactacaggcacatgccaccacgcccggctaatttttgtatttttagtagagatgaggtttcaatatgttggtcaggctggtctctaactcctgaccttgtgatccacctacttcagcctcccaaagtgctgggattacaggcgtgagccaccgcacccggctgagattttcttacttgagttcccaatgggtcgtaaagcagcagagacaactcacgatataaacacatttggcccaggaactgctaacgaatgtacagtgcagtggtggttcaagaagttttgcaaaggagacaagagccttgaagagaagtagtggccagccactggaagttgacaatgaccaattgagagcaatattagaagctgatcctcttacaactacatgagaagttgcctaagaactcaatgtcaaccattccacggctgttcagcatttgaaggaaattggaatggtgaaaaagcttggctgggcgcagtggctcatgcctgtaaatcccagcactttgggaggccaaggtgggtggatcacatgaagtcaggagttcaagaccagcctggccaacatggtgaaaccccatgtctactaaaaatgcaaaactcagatgggcgtggtggcgggtgcctgtaatcccagctacctgggaggctgaggcagaagaatcgcttgaacctgggaggcggaggttgcaatgagctgagatagtgccattgccctccagactgggcaacagagcaagactctgactcaaaaaaaaataaaaataaaaataaatcatggttcaaaaccacagttacttttgcaccaacctaacaaaatatggttcaaaataaaagtctgaatttcctattgtttttggaaaatcaggtttgacaaccctatgttgattccaccatctctctcctcatgtcctgggagaggattttgcctcagtgatcacaaatacaagtgaacagtgaaggccatttccacctgactcaacagaaatgttggctggatcacaaaggctgtatcaatggcctagacctcccttctctatccttgttttcctgcctgcatagcaatgaccttgaggtgaaaatcccagaggctacaggattccataaaatttctgacaatgacctcagctacacaagatacacaattctgtaggtcctgaggatttctgtacctgctcatccttaagagccataataacgaacatcatggaaacctctgtaaaaggggcacattctatttattgcagtgttattgcagttttccactctctatcaatccagtacttctataacaattataattcctactataatcttaccacctgtggtgctaccctgtggaattcaggatatcaaggcatacaggacctggggaacagatttcccccactggcactgaacacgatgcagtattccttgtgaacaagagaacaatttcatgttgctttcagaaacatcaaaggatgtcaagtaactgctgcctcctcaggctgacctctatggcatccaggatataaattaggacaataccctgtagttttttctcagaggccttgaatagcaatgaaaactaggctcaaactagagagagagctatattctgccatcctactgtccctgtccctgtccctgttgagctacacaatgtttgggatctccaaaaaaagttattcaccccttcatgttagcagaacccaactgttttcaaaccaacccatacatatagaacccccaagattaataaggcctttgttattgtacaaaccaaggcaataagaggcagttggttcccacagttggtgatttgaaggctggcaaactctatcaagagtcatgtgagaccaacaatatcctgaaatatgtagtccctcttttcaggtcaccagcagagtcctctgggccaaactgggtcaggtccatggcctaactcatcagaaaggaaaaaaaaaaaacggaataaatgcttaggctatttacaaattcctcccatgaacagaacaccaaggttcacttacctgaatacactgggatgggtgagtggtgcacactggtggtcacctgccaggcagtagaggtaaaatggcttccactatagtatcagcagagacataaatctgacatgggccctgggcagggcaaaaggtgcaatgcagttcacacatacctggaatttatgcagatgttcagatataggatgttcaattcaggctgatgccaccctcataagggatctccttcagagctgttatatcaactggacatccctacatatcaaaagtgtctttcccttgtgaactgtgtggcactcaatgagatatggccttcagctgaagctttctgacattcactgtgtactcaaggactttctccagggtgctaacagattttccacatttgccactcataaggcttttatcgactatgaattctctgatgtttaataaggctggagttatggctaaaggatttcccacattccgtgcactcataaggcttctccccagtgtgaaccctcctgtgcttaatgaggccggaattttgagtaaaggatttcccacattcactgcactcatagggtcttgatccagtgtgaactctctggtgttttcggagactggagctgtagggaaagaacttcccacattcactgcactcataaggcctctccccagtgtgaactccccgatgttgaaggagtgcagacctttggctaaaggatttcccacattcgctgcacttataaggcctttctccagtgtgaaccctatggtgttcaatgaggctagagttttggctaaatgacttcccacattcgctgcactcataaggcctggatccactgtgaactttctggtgttttatgagactggaatgatatgtaaaaaacttcccacattcactgcactcataaggcctctccccagtgtgaactccccgatgttgaaggagtgcagacctttggctaaaggatttcccacattcactgcactcatatggcctttccccagtgtgaactctccgatgtttaatgaggttagacttgttgctaaataattttccacattcatcacattcatgaggtcgtactgcagtgtgaactctccggtgctgaatgagactagagctttgcctaaaggacttcccacactctcgacattcataaggcttttctccagtgtgaagtctccaatggtcattgagactgtagcttttgctaaaggatttcccacattcactgcatatgtaacatctttctgtagtgagggttctctgctgctgaacaagtgtgtgtttaccgctgaatgcttttgtgtgttctccacagttgtaatgagtttttcctctgtgactgatggccccaccgtcgcttttgctatttgattgctccccagtgtgagcagcctgttgatggagaaatcccaacttggccaggaagtccttcccaacttctctgcaggtggaaggctcccctgacacatggaatgtgcaggtcttcacaaacaaggctctgcccacattgcttctgaaatgtttttctccaaggtgctgcttctgatgatgaacatctgcaatgaaatacaattatttcccacatgccccacctctatataatttctgcctatgatgtgtcccctagggcccagccaagagcaaaatgtctctcaagaccaggctacacgtctcacagtggtgggccttctagggagaaagatctgccttagaagtcctgagttgggtcactccttctaaagaaatgctcttgtcagaaggtgcctcctcatccaccactctatgccaaaaacctaaaagcaagaaatgctagtgaagtgcacattaactatggtgggagggggcagcccttatacaagtgtgtgtatgacaaacccaggaacaagtccatgggatcgtttgcatgacagtagagttgggttcagttgcagatgaggctgtttagcaattctaggataaagattacaagaatgggccgggtgcggtggctcacatctgtaatcccagcactttgggagtccaaggtgggtggatcacaaagtcaggagtttgagaccagcctggccaatatggtgaaaccccgtctctactaaaaatacaaaaattagctggacatggtggtgggtgcctgtagtcccaggactcaggaggctgaggcaggagaatcacttgaacccgggaggcggaggttgcagcgagccaagattgcaccactgtactccagcctgggtgacagaaggagactccgtctcaaaaaaaaaaaaaaaaaaaaaaaagattacaggaatgtgggagatctcaagaggtaaaggccacaaccatgaggtatcacaaagagagaggcagggtctaaaactaaatcctctgcaaacaactttagcagaagcttatctgctggcgacacatgagtgctatgtagaatagtatatgcaagcccatggaaatacgactgcaatgcagcagctggccttcaaggactgtttaagagtatgtgcaaggacaggcgcagtggctcacacctgtaatcccagcactttgggaggccaaggtgggtggatcacaaggtcaggagttcaagaccagcctggtcaagatggtgaaaccccatctctaaaaaaatacaaaaatgagccaggtgcagtggcatgcgcctgtaatcacagctactcaggaggctgaggcaggagaattacttgaacctgggaggcagaggttgcagtaagccgagatcatgccactgcactccagcctgggtgacagagtgagactccgtctcaaaaaaaaagagtatgtgcatacctcatgacacactatatagaggctaacgttagaaagaactgcaggtgtagcagtgagaaaaacagataagatacggagtccagagatgtgaggattagccccaggctggatgttaagagcagaagtgacaagtagtagagctgacttgtcagcaaaatgtcaagaatggtgaagggaaaccggaagtgagctgtgaccactggcattggcaccaaaatgctcgccaaacagaacaggttgctgctctgatacagcatctggataatgtaagtactaagggaagaaagaacagaagagcagcctgcactgtcccacaaaaaactcagcacatgacagcccacaggaaaaacacacacacacacaaatactacaaagaaaatttcagaggaatactttgtaagaagagtccatggtctacataagtagtgaccatgtcagtgacaataactcctggcataggcaggcataatgaaatgccagctcgggatggaagtagtagctggggcacacaggatcctcaaatctggaaaaagtcacccagacatggaggggacaatcaaggtgggatccactagggtgactgcaagactgcagactctgaatccttccctgtgaggctgtgaggaaacaggtactggggctcctcaaggagaggagaagacagtatgcacaccttagtcttaccaatgacagaactatgcagggaactgagaaagaagcagagcccatagtcttgtcatgagaaggacagacctgcctatagagaaaagaggaagggcacagactagctcagggcacaggaaagggtaaaagaaccttacctagagaggttaaaagagccaagttctccagcatcacatcacggtacaggcatctttgagcctcatcaaggagaccccattcctcccaggagaagtgtacggccacatcttcaaaggtcacagtgccctgccacaatgggaacagatgaaaccaccaagagcccctatcccaaggacccacaatgcatacccccacatctttaccccatgcccattctcttcccaagctccccaactgagaggagaaaccagcacatggataaataggcatctaagctgggggcctggcatggaaggatccatactatcccatcatgaaatccccctgaaatgtccaaggtcatctaagtctcaataccagggccctgcagctgtcacttactccctttccagatgcacatcattcttcagaatacacatccctcctatctccagacaccacagccccaagcccagggctgccacctcactgcccacaccataggcatctccctgctcttacctcccatgtcactgttttaatctcttcctctttaccccattagcgaaggcaggattgccacactagggttatggatatggacaaacacacaatacctgacactagaaagacgatacagcagttgggtatggtggctcatgcctgtaatcccagcactttgggaggccaagacgggtggatcacgaggtcaggagttcaagaccagcctgaccaatatggcgaaaccccatctctactaaaaatacaaaaattagccgggcgtggtgaagcacacctgtaatcccagctactcaggaggctgaggcaggagaattgcttgaacccaggaggcggaggttgcagtgagccaagattgcgaaactgcactccagtctgggcgacagagcgagactccgtctcaaaaaaaaaaaaaaaagaaagatgatatagcagtttattaatcatatgtacatagaacctgggagatgaggacaacatgtaccacacagggtcacatgggggtctagtccagaaaaaaagtgaataaccaaaaactgtgggatgcaagcactttgagaacaaaaggatcaactgccccctggttcccacaatgggcttgtttggaaaactccatgacctggtagggagctgaaatctgctacaaagtgataggcagaaattgtgcctggtctccttgattaaaagggttgtctgtttgggagaagagtagggagggaaacttgtactcaggccatttgatgccaccctgatttcaccagatgtcatactgggccttaattttagactttacaccataacttagcacacagcgtccagagtatgctcgacagattcaaacggatctaatactaccctagatctcccagggcatccactagtggtagcagccccaaatcctatgagggctccctggctggctccattctttgcctcagatttaggccacacagaaccacatgtgcatctcagatacccatggccctattccacttccgtgctgcacttgctagcccctcagcagtaacaaccttcctctgtccacttaacactcaaagactagctccactgatcacctaccccaggccaagtgactgtcacagatgaccacattggcacctggccttatcctccaggttgaataaacaccctaggccccatcaaagtcatcaaaaaatcctggtgattccacagagtgctgaataagcacaaaggaaaaaaaggacagccatttgcctcaaatacacctatgcctctgcatccaccttatatccactcttcccttgaaagtgtatgccacctgcccaactatcctctccaaacaccctacctccatagccactaacctcccttacctctgtttagaaagcccaagaatatcacccacttatccaaccaaaaggcttggtccttagcccccattctgcccttcctggccaaataacctgtaccaccatgcctaaagattaacccttgtaggccggatgcggtggcttacgcctgtaatcccagaactctgggtggctgaggcgggtggatcacctgaggttgggagttcaagactagcctgaccaacatggagaaaccctgtctctactaaataaatacaaaattagccgggcgtggtggcgcatgcctgtaatcccagctactcgggaggctgaggcaggagaattgcttgaagccgggaggcggaggttgtggtgagccaagctcgcgccattgcactctggcctgggcaacaagagagacactccatctcaaaaaaaaaaaaaaaaaatagaacaacccttctaaatgtaatccacagctcactcaccttagtccacacaatgaccaccacattttggatgtctccattctgaagcactccccagatttccagacctgggtgttcagccacctacttaatgcctacttaatgtctctgaaacatctcaaactcttacatgaccaaataaagctcctgttgtctccagtgaatattactgttaataccaacttctccatctcagttgaagaaccatggggtcatcgctgaatcctgtttcactccctcgctgtctacatcagaaaatttagttgctccctttaaaaatttgcatccagaatgcaacacatctcctaatcaatgactctggtccattaccctggactggctgtagcttccactctgatcttctttcctcttccctcaaccccacagtctgctctccacgctaacgggatggaccctgttaggactttggtaagatcacctccctcttgtaacccaaatctctcattacctccagaataggtacccaacttctcaggcagccactgcagtcctgactccttccccctgctctttgttcccagctaaaaggaaacagatctatggtttcctcaaaaatctcagcttagttttactaagcacttgcgcctcctgataccagtgccagagataacctttcacaagtttccactggctgacaaaaatgggaacacctcagtataacccctgtaacctctggcatggacttaagagccctgggcttggaatttctccagggcaccagacccaggattggggtaacagcacttaagaatactaggaaaccacaatcccaagaacatgggggtagaggctactgagggaccgaacactctccacttccctatgtgagttccatacgcccttctacaactgggagaaccagggaaagaggaatgcatccctggtgaggctagatgagctcaagcctccctgtagccctgcctggccctgaactcaggctggctgttttactttctggtctcagtgctgtcacctcttgccaactgtagggcaatgaaaaaaagatgtagcctcccactatctcaatgtcctcatcgccccatcgctgctcttcctgtgaacagtctttggaaaagtttttaaaccctaacatagggcgggcacggtggctcacgcctgtaatcccagcactttgggaggccgaggcaggaggatcacttgtcaggagttccagaccagtctggccaaaatggtgaaatcccgtctctactaaaaatacaaaaaattagccggacgttgtaatcccagctgcaggcttgtaatcccagctgctggggaggctgaggcaggagaatcgcttgaacccgggagtcggaggttgcagtgacccgagatcgcgtcattgcactccagcctgggcgataagagcgaaactccgtctcaaagaaaaaaaaactaacataaatggcgtccctcctttgttcagaactctccgtggcttctagcatcctcacaatgacagtacaaccctaggagtaactccgcctcatattcttcgttccctgcagaaaacagctttccgaattctcctggctcagtcgcgcctcaacctttgcacgcgccggttcctccgcctgtcacgctctcccacacctcgtcacacgcagtgtcaaaaaaagggccccacccacgaacgcctcagtgtccccgaccctgggcagcggggactcgagcaggcgcccctcactgatggctttagaacgtgggtgggggaaggtgtgtgaggacgggaagacgccgcactcacctgagttggcgtcctcagagtggccgctgccatcagactctgcgggtagagctgggccgggagcgacgggcgacattggtagggacccggggacagcggtccctatcccaggcctgacgtgggtcccccagggcggcgtcgccaaggcttagacgctttcgtgcaggagggacgacgactcccctcacgccttcgtggccccaactcggcgctctgctatctctgatccggtgaacacacctcagagaagctaaaatggccgccacgaagaggcccccccaaaagtcccgtcctttctttttgtgactctcaaggaaagtcggttttctgagctcttactggcttagtagcgtggcgttcaacgcagagcattctaggtaatgtagttttcatagatcccgaggtgggtgccggggaccctttgcaccaacctcttggagtaaaagcgaagctccagggcgctgggcgatgagaaatggcttatccaagtcctagggcagtggagggacttcgccctttcttaaatgggtcgtaatcagacagcatattagaggtgccatctgcaactgatcacccaagtgtttggggaatattatttcaaacttcataaagttcagcaggctcccagaggctaaaattattatcagacgctccctaaggctgccaatccaaatatgtacatcattccatagagccattcagacacgaaatatatccactagtagggaagctaataaacattaccatataagtttattcctttttttttttttttaagacaaagtttccctctgtcccccaggctggagtgcagcggcgccatctgggatcactgcaacctccgcctcccgggttaatcgattctcgtgcctcaaccttccaagtagctgggactataggcgcgcgccaccacgccaggctaattttttgtattttcagtagagacagggtttcactatggtggtcccaaattcctggccccaggtgatctgcccgcctcggcctctcaaagtgctgggattacaggcgtaagccaccgtacccagcctctatcatattacatttcaaatgtatgcactccgaagcattgaagtcagtctgtgcacttttggtcagggacaggtgaaaaactacttcagatagtggcatgatagtgcttctagaagatagaagagaaatgttagatcaccttgaaacagtagtacaaaggtagaattctgtctgattccaacagaaaacatcttttgcctgcatagtcaattattgtgtccaattactgtgtccagtcaataactgtgtccaattcactgagcaacgcttttatccatttcataattcttacttgatatctgagatatattccttctagaagtctaacatcaatctcaaaaaacaatgaaagaaatgctactttgataagagacaaaggggagaggtgggacttcttaatcagaaagccggtgaaatgcacttgaaggaagtgagaaatgagccatgtgggtatttttagaataaattccaggcagaagaagcaggttactagagtgcctggatggatggagacttcacagggcatttcagcattggagggcctagggctccaacccagcaggccttcatctgctttgctggctgcagagacactcagggtatataggtgagaaatctcttcttttttttttttctttttttttgagatggagtttcactcttattgcccaggctggagtgcaatgacgcagtcttgtttcactgcaacctctccacctcctgggttcaagcgattatcttgcctcagcctcccaagtagctgggactacaggcgcacgccatgacacccagctaatttttgtatttttagaagagacggggtttcaccatgttggccaggctggtctcgaaccactgacctcaggtgatccacgcatctcggcttcccaaagtgctgggattacaggcatgagccaccgagcctggccgagaaatctctgctgctttgttataaagttttggagccgcaaaataaatagcactcgaatataaaattttctttttaattctcagcaaggtaatgtacttttttttttttttttttttttgagatggaatcttgctctgtcacccaggttggagtgcagtggcgcgatctcggctcactgcaagctccgcctcccaggttcacgccattctcctgcctcagcctcccgagtagctgggactacagttgcccaccaccatgcctagctaattttttgtatttttagtagagacagggtttcaccatcttggccaggctagtcttgaactcctgacctcatgatccacccacctcggcctctcgaggtgctggaattacaggcgtgagccactgcgtccggccccaacatttattttaatgttcagattctcccagatgtttggacagtgggaactcattaaagctgtgctctctgcttttttatgtcaatattattgataatttcattactttctaatccaaaaatattttcaggctcatgttgtacccttgctatcccagccccagaatcagcctctttttcaaggagctctggttttcttcaatagataacaatgcttgtaaatattagtaagcattagctgtgctcttttctactggtaaatcattgattattaggtcctcttggagagaaagcagatacatacacatgcacgcacacatttttttttttttttttgagacagagtcttgctctgtcgcccaggctggagtgcagtggcacgatctcggctcactgcaagctcagcctccgaggttcacgccattctcctgcctcaggctcctgagtagctgggactacgggcgcctgccaccacgcccggctaattttttgtatatttttagtagagacagagtttcaccgtgttagccaggatggtctcgatctcctgacctcgtgatccgcccgcctcggcttcccaaagtgctgggattacaggcgtgagccaccgtgcccggccacttgcacacatttctatacaaatttatttctacatctatatttacatctgcaaagacttgaaaaattcagatatttgaaatgactcatgggactgaaagcactctctcataaggcttttatttaaatataaagcatacagtacagctagagaaagacagaacaggcatcagggctcagaaagatctggacccatgaccctcaggattcttattcacaagtggacatgcttcatctctggactgtgccactaatatatatgggatggagcttgatttcagaagaattaataacagaaatttccaatagggacttttatgtccctctggctgcatgacccaagccaacctagccatttatgccaggtaaaagccagctgtaaagacacgaaaaaatttcagagtttaagcagcacattgtaactcccactgcctttctttgctaaaagtcaaactaggtatccagatgtccccagagataagcataaaattgtcctattccagctataaagtgttatctgttctccacagtcatccctttgttggctgggtatttttaattacaaatcactccttcttaatattaccctacatcattttcactatttatagaacagaacaagcaaaaagggcagctgtcaaaatactttgtgtgcattatttgagaagtgggtattgcttcaaaatatttcagaaaatgaaatagcccagcacaaaggttcataatcatgcacaagattggctactattttacctccttccatcatcaactttaataacagtatcaatagacccattcaattcaaagttaattctagttcctctcctagccaatattttccacggatagaacatcttgtggttgttttaattcaatttctcacttcattttataatctgtatcagtcttatcataagctttgtttgaaatgtgttagtcaatttgtgatgccataaaggaatatctgagattgggtaatttatttaaaaaaaaaaaagagggagatgtatttggctcacagttctgcagacagtacatgaaggaaagtgccagtatctgcttttggtgagggcctcaggaagcttacaattttggcaaaaagtgaaggagagccagcgtgtcacatggtgagggagggagcaagagaggtaggcaggaggggccaggcttttctaaacaaccagatcttgcatgaactcagtgagaactcactcactaccatgaggacagcaccaacccattcatgagggatccacccccatgacccaaagacctctgactaggcccacctccaacgttgaaggtcacatttcaacatgagatttgcaaggaacttacatccaaaccatatcagaacacatcaaattaattttaccagatataccagtattacaccaaatagcagataacattatgagtctgatcatgatcattacaaaataagtcaaaattacagtatattctccacctttccttcaaattggggttcttgcccgtataccaaatatatatgttttttagacataggttctcactgtcacctaggctggagtgtagtggcaccatcatggttcactgcagcctcgagctcctgggatcaactgatcctcccacctcagcctcccaagtagcagctcatataccacatattgtcctacaaaagggtttaaatccagggccaagtatcatccagagaatttatttttatttatttatttgactctcgttttgtcacccaggctggagtacagtggcacgatctcaactcactgcaacctctgcctcctgcgttcaagtgattctcttgcctccaccttgagtagctgggattacaggcacccaccaccatgtctggctaatatttgtatttttttttagtagagacggggtttcaccatgatgtccaggctggtctcgaactcctgacttcaagtgatccaccagcctcagcctcccaaagtgctgggattacaggtataagccaccatgttcagcccatccagagaatttaaatgttcttctgagggcagagtaaatgcatattggggactatccctaatgaatgaaaattggctttggcttcctaatggaaaagaaggcatgagccaaatctagtacagaatactgatctctctgagcttgcagcacagctttagttgttgatgccatatcagatatagctgatcaaatggggtgacatcaatttatcaagtcttccgtaatctatagttaatttaccagatccatcagcttttcttccaggccatcctagaccgaggctggagtgcagtggtgcaaacatggctcactgcatcctcaaactcctggccttgagtgatcctcccctcagcctcctgaatagttaagactacaagcatgttccaccacactcagctaatacgttttcaaattttttgtagagaggaggtctcactatgttgcccaagctggtctcaaactgctgggctcaagtaatcctcctgccctggcctcccaaagtgttgggattagaggtgtgagccaccgcacccagcccatcctagactactaaatagggaattttagtaatatacctgcatctaaaagatccttaattcaagtcaacatttatttcccccaggaattctatggtgttataatcacttgagtgagcttagctgattctaaagattccatctagcatgctcaattaacacaggactaaaagcagatttacatggcatcctatcaattccaataatgccttgtggtaatggtgaagcaaaaatcatacataatttctgtccataaatgcctctatagaccatatttctccagctgcaagccttctctagctgtatcactatgttcgtgtaattgtatttccttttaagtttacattagctaactaagttatagcgacatcgatcatcaattgtagtaaagttttctcactgcctgcagaccatttacttcattccaatgaaagtgaacttgaagtcccagctagaggtcatgagaccctaacaaggtcatgagatccattgtcaaaggaaattaaattttgggaccccaaacccatttagccaaggggaaaagtcaagctgggaactgggtcatgcaaacttgcctctaccttttggttcctaaataaaatggctgcaagatgaaaagctacccactttccccatattttacccacaaggaaattactggtgagctgttaaaacttcaccatggtggccaggcgtggtggctcacgcctgtaagcccaacactttgggaggccaaggcggctggatcacgaggtcaggagttcaagaccagcctggccaagatggtgaaaccccatctctactaaaaaaaaaaaaaaaaaaaaaaaaatacaaaaattagccaggtgtggtggcaggtgcctataatcccagctactcgggaggctgagacaggagaatcacttgaacccaagggacagaggttacagtgagccgagatcatgccaccgcactccagcctgggcgacagaagtgaaactccatctaaaaacaaaaaaaaaaaaaaaaagaaacaaacaaaaaacttcaccatggaaatgcaaactgatagtttatctttacaggtgcggtcaccccagcctgtcagacacaaaatgcctaccccatttcctctgtgttatcttatgtaaaatgcagattccccacatctttcttttgcccccttttttaatgtgaaaactgtgtgcttctcaatatcccaccctttcctctttaaatttggagccctaaaaatcatcttcagagaaaagcatagacttgtctcccgggtgggtcgttaactttggcaaataagtctccaaaatgattgagacttgtcttgtcattttcttcaattgacatcatcattcagtcataatactccccatttctctccctggttataatcagagcaggctctgaagagattatacttgtcacctttttataattttgacattttgaaaaattatcaagactagggtgaattaattagttccagatctttcagtagaccagttatttttacagggattcaatatttttagtaactactccatcttcctttcttgtttaaggtcatttttgatcaaccatctaaacatttttatccaattctgttttcctgaggtttcttccatctctttttatttatttatgtatgtatttatttatttattttgagatggaatttcactcttgttgcccaggctggaatgcaatggtgcaatctcggctcatcgcaacctctgcctcctaggttcaagcaattctcctgcctcagcctcctgagtagctaggattacaggcacgcgccacaatgctcggctaatttttttgtatttttagtagagatggggttttaccatgttggtcaggctggtctccaactcctgacctcaggtgatctgcccacctcaccctcccaaagtgctgggattacaggcatgagccaccgcgccaggctatctcatctcttttatttttagttacttttcttctgaatgattcttacttttccctccccctccagtattaagtcttattcaagacagctcaataaggaggtccataacatcaagcctcatatcatgttgcctccccttttaccatgacatcaattagctgggtctgcaggatggagttaggaaaaggtatggtagtgtacttaactacaggctagaatctacagctggtatagtttagatgtgtgtcccttccaaatctcatgttgaaatgtgacctccagtgttggaggtgggcctaatgggaggtgtttgggtgttttgcaggacatttagttatcccctccgacccacagactccaggtcctacttatattcttcctcctgtttgtgagtgaatcacataacttgtgcaatctcaatccaaggactggaagccaacctattcacaaaaaatcttcctcaccagcctctaccatatttcattctgcccaataactccttagccattattatttaaaatggactcagagatcatagcaaatatcccattttcatcaccaaatgaaaaaatttcaaaaatgtaattgaaaatactcacaaaactccacagagaatactcgcgtgaggttttgttaaggcaaaggatatggtgcagcaagagaaagaatgcgtgcccatatgctatgtcagacacaaatccaggcagttttccagactcccattcatacactgatatgattcacttccagatcaagccaccaatatctgagagagaaatgctggcttcaggagagctcaagtcagaggatcccagcagggattttatacccttctggggtaacacagttgagccagagtgcctacctaatcatgtatgccaaccagaaaccatcagcagtcaaacttgccctccatattgtcatgggatcttccagatgttaaacaataataataaagctcactgcatttaaatgtcaaaatgagatacctaaagtccctacagacaaaactagagcttttccagtccaattttaaactaattccatctcacacaaaacaagtgcacactatatcaaaatttgggggatactgctaaagcagtacttacagggaaatttatagcctatattattatacaagaagagagttcacaaataaatgacagttcattttaagaaattaggaaaaccagccaggcatgctggctcatgcctgtaatcccagtgctttgggatcacttgaagccaggagttcaagaccagcttgagcaatacagtgagactccatctccaaaaacaaaaacaaacaaaaaagttagccaggtgtgatggcacatgcctgtaatcgcagctacttaggaggctgaggattacttgagcccaagagttcaaggttacagtaagctatcatagtgccactgcattctatcctgggttgacagagagagaccctgtctcaaaacaaaaaagaaaactgggaaaacacagacaaatcctataggcaaccctatatagactctatcctctcttgcctcttgcttcaggagcagccctgcctcagtgacagcaaaaagtggcaaccaagaaagctatttccacatgattcaccaggaacactggctaagttgcaaagccatgtccctgaaatgctagatcttccttctttcaatcttggttttcctacccacttacacacccagcaatggtctttttttttttcttttttttttttttttgagacagagtctcgttctgtcacccaggctggagtgcagtggtgcgatctcggctcactgcaagctccgcctcctgggttcatgccattctcctgcctcagcctcccaagtagctgggactacagatgcccaccaccacgcctggctaattttttgtatttttagtagagacggggcttcaccgtgttagccgggatggtttcaatatcctgacctcgtgatccgcccgcctcagcctcctaaagtgctgggattacaggcgtgagccactgcacccagccccagcagtggtcttgagttgagccatctagagtctatgggaatccacaaaatgtttagatttgccctgggagtgatgctgaccacaaaagagacatagctgtggaagttctgaaactttctgtatactctcatcctatatagccatagtatgggaacatctgagcatgtacctttagaagtggcacatcccaggccaggtgcgtggctcacgcctgtaatcccaggactcgggaggccgaggcaggcggatcacctgaggtcgggagtttgagaccagcctgaccaacatggagaaaccctgtctctactaaaaatacaaaattagggctgggcgcagtggctcacgcccgtaatcccagcactttgggaggccaaggcgggcggatcacgaggtcaggagatcgagaccatcctggctaacatggtgaaactccgtctctactaaaaaatacaaaagaattagccgggtgtggtggcgggcacctttagtcccagctactcgggaggtggaggcaggagaatggcaagaacctgggaggtggagcttgcagtgagccaagattgcaccactgcactcctgcctgggcaacagagccagactccgtctcaaaaaaaaaaaaaaaaatacaaaattagccgggcataggtgatgcatgcctataatcccagctactcaggaggctgaggcaggacagtcacttgaacccagtaggtggaggttgcagtgagccaagatcacgccattgcactccagcctaggcaacaagaatgaaactccatctcaaaaaaaagaagtggcacatcccttgtagtgtgccgcaatctcctcaactccctattagtcatacccagtgtttctataccaattataattaccacctggctcctagaggtcctccagacaaggacacctgcctattaaattctgaacacagactccttgacaagaagcaggggccagcttcccaataagtgcttggaaatatggaacactggatgggaaccagtgaccaaactcatgctcccaggtgctctagaagttgttacaactgatctctcttcatggttacctccaaacctacagtaaaactggcatccaggtcacatgatttgtctcccaaagccctgcagtctgtcttagaagggcttgaacagcaacacaaattaggtcaaagctgtaatcagagctgttctctgccatttgctctaagggacagaaaacaaggactcccacaaaagctgttaacttgttcatgctgagaacacacctgtttcctcaatagactccaaacaataaacagaacccacaacattaatggtggcttaaagaacaggcctttattatcatgagcaatgtgaagcaggcagttccagagctgggtgacttggatattggatatatccataacgagcatcatatgaaatcaatcaacacaggtaagtctctgcaggctatttgcagaatccttctgtgtcctcttgaacaaagctgattatttccatgccatttacatcaaaagagaggaaattaagacccctagtgggctgtgagaccactcacaacaccttttagggactggggagagaagagaggtctgcccgtcacaagcatgctggggtaaatggtaaacgcagtatgattctgccagatggtaggagcagatggctcctgccccagcaaaggccaatagccatttaaaaagtgcaacacagctgctgaaagcatctcacatacttgacactcacagggaatctccccagtgggaatgtccatatctatgaagtttcacttcttactgatggttccctcccaatggctgctcccagagttccactctagggtgagctgttgggctgaacagagacagcacattgcttagactgctaaggcctgtgtccggtgtgaaattcccaatggcgggtaaggttcagcctccaggggaaggctttcctgcatctgctgcactcattaactactgctagttccccaccatatagtaagtcaggggcattggcctaagactttcccccacatttgctacactcttaaagcttttctccagcatgaaccctctggtgcagaacaagtgtctgtttccggatgaattctctcccgcactcactacacacataaggcctttccccagtgtggactttccagtgcctgatgaggttgggtctttgagtgaaggctttcccgcacttgctgcactcataaggcttttctccagagtgaactttctggtgctgaatgagtttggagatgcagctgaaagctttaccacatctgctacactcataatcactgctgtgaattctccagtgtacattaaggtgggagctttggctaaaggccttcccacattcactgcactcataaggcctttctccagtgtgagttcgttggtgcagaacaagtgtgtgtttccgactgaactctttcccacattcgctgcatacataaggcctggctcctgtgtgaacttcctggtgtcgaatgagattagacttactgctaaaaaatttcccacatttgccacactgatagagtctttcacccgtgtgaactcgcctgtgctcaatcaggccggagatttgtctaaagaatttcccacattcgctgcactcgtatggcctttctccagtgtgaactgtctggtgtttaaagaggtcatagctttggctgaagaatttcccacattcgttacactcataaggcctttctccagtgtggattctctgatgccgagcaagtgtgtctttgcgggtgaaggctttcccacattcaccacacctgtgatacctctgtcccatgagaaagccactcacaagcttagtgctcttgtggggcttcatgctgctgagagaggcctgatgctgaagaaggccagatgtggctgaaaagtctctcctacctttcccacatgtgagggtcttctctggcacatggactctgcagcttttcacagagtctctgccctccttccttgggaaaagtttccctccattgggctggttctggtgctggtcaaagtctgtactgaaccagaattgctttccacatgccccacacaagtatggtttctgcctggcttttcccccatggtatttagccaggtgtaaggtatctttcaatattgggccacatatgtcacatgggtgagactccagctctgccatgagagtcctgacctctgacactcctgctacaaaaatgctctgctcagaagatacctcttcatcctccactccatgccaacaacctgaagaacacacaaatgctgattaaatgcatatttacgggtgggaaggggcaacctcattgtatatgtgcatttgacacatgcaggaataagttcatgaaactgttttcagaatgagaggcatggtcagagtgaggaaggaatggctttgaggtagtgagcctctggaggtcataccatgggggagtgccaatgaagggccaggatataagaatggaaccaaacaaatggcttccagtagggccttgactgttagtgactcgtgagtgctatgaaaaatgtatccagtcccaggaaaatccaactacaagtgagcagctggtgttcaaagactatttaagaatatatgcacatcttgtgaacattaattgcaggtcaatactgccaaaaaatgtagacagagaagtggtgaaacatgggtgtaaggtgaaggccagaggtgagggtggcaaggggctaacaaactagaaatgatatatcttcgtgtcaagaacaggaaaggacagatagaaacgctgtgtggccactggccctggaaacaaacactgatgtgaacagttaatgttgccagttttgaacccagctttgacatcgtgcccttccccgatgtccactcaccaggtctaagtcccctctgggcctctctttctgtggctgaagtcatatccacctggtcatacacccagggctcttctcctcgctctagtttcatgactgcacgtgatctggaaaatgcaattcctaagggaaagtcagaacaggtgagcagccagcactggcccatggcaaaccaccctatgatggacttcaggtaagaaaaataacctgggaggagttgtgcaggaataacccaaaggtccctataagtgactatgtaagtgcctataactcctgacaaggtcaggccctagaagatgtcacctgagctgggcgcagtggctcacacctgtaatctaacactttcagaagtcaagtcagggtattacttgagctcaggagttcaagaccagcctgggcaacatggcaaaaccacatctctacagaaaaattagctgggcgtggtggtgtgtgtctgtagtcccaactattcaggaggctgagatgagaggatggcttgagcctgggaggtagaggttgcaatgagctgagatcatgccactgcactccagcttgggcaacagagccagaccctgactcaaaaaaaaaaagaaaagaaaatgtcacctggagaaagggacagaaccttgggcacagaggcatcataattttggacagagtcaccagtacagaaagcgaacagacctagtgagatccactgggcaaaccacaagtctcatgaccccaaacccttggctgcacggcttcaggactactcagcaagtagggaggacactccatacagcttagccctggcatcttgagcacctactccaggaaactggtgaaggaagcggtgctcatgatcccaccataggaagaacagagtggtaaaggcagaaaagcatgaggaccttacccagtgaggctaaaagtgcaaagttctccagcatcacatcatggtacaaaagtctctgagcatcatcaagaagctcccattcttcccgagagaagtatacaaacacatcctcaaagaccacacagccctgcaacaaaagggacaggaaggaccataaaaagtctcttgaccaatgatccccagtctacctacccacaacatcctgctaactaacctcccaggttcccaagtcagagataccaggcactagtaccactgatcctcactctctcctgatcaccccagcaatcactgtgtcagcccaccacaacaacagacaggctgacagataaatgccatttacactctgagccagccaactcccctggggtacccaagatcacaaatcccaggtatgaacctaggctcatttttctcagttaagccccaagtcacaggaccgtcagctcacactccctcctctcatacacatcactctggactatgtctccctcacatctccagcttcccccccaccctactggcccaccccatctccctggactccccaaatgtcactctacacatagcattaagagtgcttgccgaaggcagatcacgaggtcaagagagcgagactatcctggccaacatggtgaaaccccgtctctactaaaaaaaaaaaaaaaaaaaatacaaaaattagctgggcatggtggtgtgtgcctgtagtcccagctacttgggaggctgaggaaggagaactgcttgaacctgggaggcagaggttgcagtgagctgagatcatgctactacactccagtctggcgacagagtgagactccatctcaaaaaaaaaaaaaaaaagtgcttgccaacaatcagtatcccatcttgctccaaaccatcaatggccccattgccaaggaaagccctattgttgctctgaaagcctcccaatctggccctgttccttttttcaatcacaggcacctcaaaccacatgcagatctcaggtatcctcaaccctcttccatttctttgttgcacattgtaccactgtttgatatggattggatgtgtatcccctacaaatctcatgttgaaatgcaacccctagtgctggaggcccagggaagccaaaagattggacacccctgatttaaagtgagagatgtgtaactactcctttaacttgaactcttagaggccactgtagggttattaactgacctgatttcaatattgctgtgtgtcagggaataggaacgcttaaagagagggagaaggatggggatcagctggtcagtgaggcagtcagaagacacataacaatttttttttttttttttagacagattcttgcactgttgcccaggctggagtgcagtggcacgatcttggctcactgcaagctccatctcccaggttcacaccattctcctgcctcagcctcccgagtagccgggactacaggcgcccaccaccatgcccggctaattttttgtattttcagtagagacaaggtttcaccatgttagccaggatggtcttgatctcctgacctcgtgatccacccgcctcggcctcccaaagtgctgggattacaggtgtgagccactgcgcctggccgactttaggcatttgacacagatctctaactaacttaatgcaggcagcaggagataaatacccatgctcagctgcatcatgaaaacggaagaaactggaacacattcaacaccctcaacacattccagctacatcaaaagagtctggttcctaccttctggccttaggataatgacagaatgtagtacatcctaagttccagagagttaccaaaaacagagacagcattctggacaaacacaaagattagagaagcaccttaaatctttggccagatggattcgtgagatccttctactacactaggcaagactgggagaagtagtgaacttttttttttttttgaaatggggtctcagccaagcatgatgactcacacctgtaatcccagcactttgggaggccgaggcgggtggatctcctgagggcaggagttcgagaccagcctggccaacatcgtgaaaccccgtctctaccaaaaatacaaacaaattagctgggcgtggtggcgggtgcctgtaattccagctactcaggaggcagacaagagaattgcttgaacccagaaggcagaggttgcggtgagccgagattgtgccactgcactccagcctaggaaacgtggtgaaaccccgtctctactaaaaatggaaaaattagcggggtgtggtggtgggcacctgtaatcccagctactcgggaggctgaggtaggagaactgcttgaacccaggagacaggttgcagtgagccgagatcgcgccactgcactccagcctgggtgacaagagcaagactccatctcaaaaaaacaaaacaaaacaaaacctggccaaggcatggtggctcactcttgtaatcccagcactttgggaggccgaagggagtggatcaactgaggtcacgagtttgagaccagcctggccaacatggtgaaactctatctaataaaatacaaaaattagctgggcatggtgatgcatgcctgtaatcccagctactgggaaaactgaggcaggagaatcacttgaatctgggaggcagaagctgcagtgagccaagatcgcaccattgcactccagcctgggtgacagagcgagactcgtctccaaaaaaaaaataaataaataaaataaaaccaaagccaagtgcagtggctcacaactgtaatccaaacactttggaaggctggggccggtggatcagttgaggtcgggagttcaagaccacctgggccaacacggtgaacgtcccccccactcccccgcccccaccccacccctcccacctccccaccccaccccacccctcccacctccccacccccgtctctactataaatactaaaattagccaggggtggttgtgggcacctgtaatctcaactacttgggaggctgaggcgggagaatctcttgaacccgggaggtagaggttgcaataagccactgcatcccaccctgggcgacagagtgagacttcgtctcaaaaaaaataaaaaaaataaataaactaaaactaaaagaaaacacacaaaatgagggtgagataatcagatagtagcaatagcacaccacccatcgttgccatcccaggccaaactcctcataccctacagctctctcctcctgcaaacactgaaaagaaccctttcaaatggcaggacccttctcttctggggggagtctcaagaatgcccactccctcttccctgccctgcagtcccagccttctcatctcttaccccagagatatgaaataacatacttaagactgccccacttaaatctgacctcctggccttgacctactccagaccgctcccttcaccccaaagatattctaagcccagccccttccccacaacttcagaccttcctctctagttgcctaagtgaggaagcctccactctgagacatctcaaagtcaccattccaaaatccaaacgttcatggaaaaacaacaaaaacaccttgctctttcatgccttactttcagtcatagctgcatatgatggagcagaaaatcctgttggtttcaaatttaaaacctacccagaatatgatcacttctacccactcacctgccattactcttggtacatccaccaccaaagcattcctggaatccactgcagtagcctccttaccggtctcctcgtatccatcctcgcagtccccaccccaaactaatgttctcccctgagcaaatttcgagacacttaaaatcccagctaagatcacgtccttctattcaaaaccctcagttaatctcaacgccctcagaatgaagcgacaacttctcagcctgccattccagtcacagttcctcaaactctgctctgtgttgatgagaaccctgtctcccaaatgtttgggggtcagcagcacccccgagcctttacctgcgccgtcccctccgcccgtaactctcccacacccacccacaccgagataggaccccgccccaagagtgcgtcgctgtcctgggacacaggggctgcaggcactttacgattcggagtcggagaaagggtgactgagggcccggaggacgcagcacccacccgcgcggagtccgttagctccgccataggaccgtgggcgcggacagctgccgggagcggcaggcgtctcgatcggggacgcaggcacttccgtccctgcagagcatcagacgcgtctcgggacactggggacaacatctcctccgcgctttcccaacacctccacctgcggcccacacaagcgttacagaaccccggccagggacagcctgacagaaacaaaatgtccgctacaaggaggagccggaagtcccgcccacgcaccccccgcaggcactgaaacacccctctcctgggccctcattgggtatgcaacgtataggtttgtgggtagagtgtggttcccactgagctatccttcaaggcaggggattctcggcctgggctcttgggaaaactcgaagtaggagggccaagttgtttgggaaaagtaacccgagtttcaaagggctgacaggacttccgtcctcttttttttttttttttttttttttgagacagagtctcgctctgtctcccaggctgcagtgcagtggcgcgatctcggctgactgcaacctccgcctcccgggttcaagcgattctcctgcctcagcctcccaagtaattgggactacaggggcccgccaccacgccaggctaattttagtacttttagcagagtacgggatttcaccatgttggccaggctggtctcgaactcctgactttgtgatttgcctgcttcggcctcccaaagtgctgggattacaggagtgagccatggtgcccggctgacttctgtcctcttaaaaggcctggacctagattccctggagtgtagtatgcaccgatcgcagaaatgttgagacatttcagatgttccccaaagctgcaaaactaaatagatacaccacaccacaatgtctctttgcgtacactcacagctagaagctaataactattaccttgttgctttttaaatatgtgtgcactcaagctttacagtaacttttgtgagcttcagtttggtcagagacggaagagaaaatattccaaacaaggccttggagtggaagaaggaagagggatgatgtggagtctccctgaaaccagtggacagatttcttcagaaaactcttcctgcctgggtaatcagtgatgtctccatcacagcaaaacacagtgcaattaccatttaacctgtcattgtcattgtaagtatggtgtctgtgttaggaggtgagattatccccgggggaaaaatcctgacagctattaataatgattccgtagttatttgaagataatgaaagaaattgctctaaggaaatatctgtgatagatggacaaagttaagatctcagtaaagtttgagcctgaatactaaagtataagtgaaagaatgaagttaagcatatggttgtgttgtgatcttgaccacactttgtcaacaaaatgtgactcttttttcctgaaaatgctgagcaattgtaaagaagatatcagaatggtaaaaatcaacagtgaagttgtgctgtcttgataattcactgttaaaatacacatccaaggaacacatacgagctctcagtaggtgtttttcaaatgtgttagtagcatgaaagacatcactaataaaatttccaagattcctatacatacaggacatgtcctgcatataatgatttttgtcctgcatcaccttttgactttgtcacaataccctaaataaatattctaaagaaggcaacagtcttaaagaaaagaattttcaacccggaatttcatatccagccaaactaagcttcataagtgaaggagaaataaaatactttacagacaagcaaatgctgagagattttgtcaccaccaggcctgccctaaaagagctcctgaaggaagcactaaacatggaaaggaacaactggtaccagccactgcaaaaacatgccaaattgtaaagaccatcaaggctaggaagaaactgcatcaactaatgagcaaaataaccagctaacatcataatgacaggatcaaattcacacataacaatactaaccttaaatgtaaatgggctcaatgctccaattaaaaggcacagactggcaaattggataaacagtcaagacccatctgtgtgctgtattcaggaaacccatctcacatgcagagacacacataggctcaaaataaagggatggaggaagatctaccaagcaaatggaaaacaaaaaaaggcaggggttgcaatactactctcggataaaacagactttaaaccaacaaagatcaaaagagacaaagaaggccattacataatggtaaagggatcaattcaacaagaagaactaactatcctaaatatatatgcacccaatacgggagcacccagattcataaagcgagtccttagtgacctacaaagagacttaaactcccacacaataataatgggagactttaacaccccactgtcaacattagacggatcaacaagacagaaagttaacaaggatatcgaggaattgaactcagctctgcaccaagcggacctaatagacatctacagaactctccaccccaaatcaacagaatatacattttttttcagcaccacactacacctattccaaaattgaccacatagttggaagtaaagcactcctccgcaaatgtaaaagaacagaaattataacaaactgtctctcagaccacagtgcaatcaaactagaactcaggattaagaaactcattcaaaaccacttaactacatggaaactgaacaacctgctcctgaatgactactaggtacataacgaaatgaaggcagaaataaagatgttctttgaaaccaacgataacaaagacacaacataccacaatcctgggacacgtccaaagcagtgtgtagagggaaatttatagcactaaatgcccaccagagaaagcaggaaagatctaaaattgacaccctaacatccaattaaaagaactagagaagcaagagcaaacacattcaaaagctagcagaaggcaagaaataactaagatcagagcagaactgaaggaaatagagacacaaaaaacccttcaaaaaatcaatgaatccaggagctggttttttgaaaagatcaacaaaattgatagaccactagcacgactaataaagaagaaaagagagaagaatcaaatagatgcaataaaaaaagacaaaggggataacagcacccatcccacagaaatacaaactaccatcagagaatactataaacacctctacgcaaataaactagaaaatctagaagaaatggacaaattcctcgacacatacactctcccaagactaaaccaggaagaagttgaatctctgaatagaccaggctctgaaattgaggcaataattaatagcttaccaaccaaaaaaagtccaggaccagatggattcacagccgaattctaccagaggtacaaggaggagctggtgccattccttctgaaactattccaatcaatagaaaaagagggaatcctccctaactcattttatgaggccagcatcatcctgataccaaagcctggcagagatgcaacaaaaaaagagaattttagaccaatatccttgattaacattgatgcaaaaatcctcaataaaatactggcaaaccgaatccagcaacacatcaaaaagcttatccaccatgatcaagtgggcttcatcccaggggtgcaagggtggttcaacatacgaaaatcaataaacgtaatccagcatataaacagaaccaaagacaaaaaccacaggattatctcaatggatgcagaaaaggcctttgacagaattcaacaacccttcatgctaaaaactctcaataaattagatattgatggtaacgtatctcaaaataataagagctatctatgacaaacccacagccaatatcatactgaatggacaaaaactggaagcactccctttgaaaactggcacaagacagggatgccctctctcaccactcctattcaacatagtgttggaagttctggccagggcaatcaggcaggagaaggaaataaagggcattcaatcaggaaaagaggaagtcaaattgtccctgtttgcagatgacatgattgcatatctagaaaaccccatcgtctcagcccaaaatctccttaagctgataagcaacttcaacaaagtctcaggatacaaaatcaatgtgcaaaaatcacaagcattcttatgcaccaataacagacaaacagaaagccaaatcatgagtgaactcccattcacaattgcttcaaagagaataaaatacctaggaatccaacttacaagggatgtgaaggacctcttcaaggagagctacaaaccactgctcaatgaaataaaagaggatacaaacaaatggaagaacattccatgctcatgggtaggaagaatcaatatcgtgaaaatggccatactgcccaaggtaatttatagattcaatgccatccccatcaagctaccaatgactttcttcacagaattggaaaaaactaccttaaagttcatatggaaccaaaaaagagcccgcattgccaagtcaatcctaagccaaaagaacaaagctggaggcatcatgctacctgacttcaaactatactacaaggctgcagtaaccaaaacagcatggtagtggtaccaaaacagagatatagaccaatggaacagaacagagccctcagaaataatgccgcatatctacaactatctgatctttgacaaacctgaaaaaacaaacaatggggaaaggattccctatttaataaatggtgctgggaaaactggctagccatatgtagaaagctgaaactggatcccttccttacatcttatacaaaaattaattcaagatggattaaagacttaaatgttagacctaaaaccataaaaaccctagaagaaaacctaggtaataccattcaggacataggcatgggcaaggacttcatgtctaaaacaccaaaagcaatggcaacaaaagccaaaattgacaaatgggatctaattaagctaaagcacttctgcacagcaaaagaaaccaccatcagagtgaacaggcaacctacagaatgggagaaaatttttacaacctacttatctgacaaagggctaatatccagaatctacaatgaactcaaacaaatttataagaaaaaaaacaaccccatcaaaaagtgggcaaaggatatgagcagacacttctcaaaagaagatatttatgcagtcgaaaaacacatgaaaaaatgctcatcatcactggccatcagagaaatgcaaaacaaaaccacaatgagataccatctgacaccagttagaatggcgatcattaaaaaatcaggaaacaacaggtgctggagaggatgtggagaaataggaacacttttacattgttggtgggactgtaaactagttcaaccattgtggaagttggtgtggcgattcctcagggatctagaactagaaataccatttgacccagccatcccattactgggtatatacccaaaggattataaatcatgctgctataaagacacatgcacgtgtatgtttattgtggcactattcacaatagcaaaaacttggaaccaacccaaatgtccaacaatgatagactggattaagaaaatgtggcacatatacaccatggaatactatgcagccataaaaaatgatgagttcatgtcctttgtagggacatggatgaagctggaaaccatcattctcagcaaactatcacaaggacaaaaaaccaaacactgcatgttctcactcataggtgggaattgaacaatgagaacacatggacacaggaaggggaacatcacacactggggcttgttgtggggtggggggatgggggagggatagcattaggtgatataactaatgctaaatgatgagttactgggtgcagcacaccaacatggcacatgtatacatatgtaacaaacctgcacgttgtgcccatgtaccctaaaacttaaagtataataataattttaaaaaagtctattcaaagggataatatcgagaatttcccaaagatattaggaaggattatctttccaagagaaagatatcaatattcaagtacaagaaggccgtagaataccaagcagatttaacccaaagaagactacctcaagacatttagtaatcaaattaccaaaggtcaagggtaaagaaaggatcctaaaagcagcaaaagaacagaaacaacacacaaaggagctccaatatgcctggtagaagacttcccagtataaaccttataggccaggagagagtggcatgatggatttaaagtgctgaaggaaaaaacttttatcctagaatagtgtatttgctgaaagtatccttcaaacatgaaagagaaataaaaactcttctggatgaacaaaagctgaaagatttttgtcaacaccagacttgtcttacaagaaatgttaaagggagttctgcaatctaaaaggatgttaatgagcaacaagaaatcatctgaaggcacgaaactcactggtaatagtaactacacagaaaaaaaaaacaatatagtagcaatgtaactgtgatgtgtaaactcatatcttgagtagaaagactaaaatatgaacctatcaaaaacaattccaacaagttttcaagacatagacagtacaataagatatacatagaaacaaaaaatttaaaagctgggtgacatagttaaagtgtaatgtttttattagtttttctcttgtttgttatttgtttatgggatcagtgttgtcatcagtttaaaataatgggttataagatatagtttaccatggaagcttcatggtaaactaaattcaaaaacctacaacagataccaaaaaattttttaaaaagaaattaaaatatacaaccagagaaaatcaccttcacaataaggaagacaggaaggaaggaaagaaggaagagaagaccaccaaacaacatggcagcagtaaatccttacttattaataaaacattgaatataaatggactaaagtctccaatcaaaacacacagagttgctgaatgaataaaaataaagacccaatgctctattgcatacaagaaacacccttcacctataaagacacacatagattaaaataaaaggatggaaaaagatatttcatgccactggaaacgacgaaatagcaggaataactacatgtatatcagaaaaatagatttcaagagaaaaactgtgaaaagagacaaagtcattatatataatgctaaagggatcaattcagcaagaggacataatctttgtaaatatatatacactcaacactggagcacccagatataaaagtaaatattattagagctaaagagacagatagagtctgacacagtgatagctgaagatgacaacaccccactttcagcattgaacaggccttccagacagaaatggacttaatctgcactatagaacaaatggacctaatagatatttatagaacatttcatccaacagcttcagaatacctattcttctcagcacatggatcattctcaaagaaatactatatgttaggccataaaatatgtcttgaaacttttttaaattgaaataatatcaagtaccttctctgaccacaaggcaataaaagtagaaatcagtaacaagtggactttcaaaatgctacaaacacatggaaattaaacagtcgtcttctgaatgaccagtgggtcaattaagaaattgagaagttgggctgggcatgatggctcacgactgtaatcccagcactttgggaggtggagccaggcggatcacgaggtcaggagttcaagaccagcctgaccgacatgatgaaaccctgtctctactaaaaatacaaaaattagccgggcatggtggcacacacctgtaatcccagctactcaggaggctgaggcaggagaattgcttaaacccaggaggtggaggttgcagtgagtggagattgcgccattgcactccagcttgggagacagagtgagactccatctcaaagagaaaaaaaaaaaagaaagaaattgaaaagttttttgaggccaggcgcattggctcatgcctgtaatcccagcactttgggaggccaaggcaggtggatcacctgaggtcaggagttcgagaccagcctgatcaacaaggtgaaaccatgtctctactaaaaatacaaaaattagtcgggcatggtggcgggcgcctgtagtcctagctactcatgaggctgaggaattgcttgaacccaagaaggtggaggtggcagtgagccgagactgcgccgctgcactccagcctggatgatggagcaagactctgtctcaaaaaaaaaaaaaagaaaagaaaagttttttgaaacaaatgataatagaaacacagcatgccaaaatctgtgggatacagaaaaataagtactaagaagaatgtttatagctataagtgcctacattacaaaagtaaaaaaaaaaactttaaataaacaacctaataatgcatcttaaagaattagagatgctagagcaaaccaaacccaaagtgagtagaagaaaataaatagctgggcgcagtagctcacgcctgcagtcccaacactttgggaggctgaggcaggtggatcaccggaggtcaggagttcgagaccagcctgaccaataaggtgaaattccatctctactaaaaatataaaaattagccagacgtagtggcaggcacctgtagtcccagctactcaggaggctgagacaggagaattgcttgaacccgggaggtggaggttgcagtgagccaagatcacgccactgcactctagcctgggcaacagaacaagactctgtctcaaaaaaaaaaaaaaaaaaaggaaaataaaataataaagattagagcagaaataaatgaaactgaaacaaagaaaacaatacaaatgtgttcaacaaaatgattttttttgtttgtttgttttttgtttgttttttttgaaatggggtcttgctcttatcacccaggctggagtgcaatggcaggatctctgttcactgcaacctctgcctcctgggttcaagcaattctcctgcctcagcctcccaagtagctgggattacaggcacccaccaccatgcccggctaatttttgtatttttaatacagacggggctttgccatgttggtcaggctggtctcgaactcctgacctcgtgatctgtccacctcggcctcccaaagtgctgggattacaggcgtgagccaccacgcccggccgagaaattggttttttgaaaagtaaacaaaataaaaaatcctttagccagactaagaaagataaaccaaataaaatagaagtgagaaagaagactttacagccaatactgcagaaattcaaaggatcattagaggctactatgatcaactgtatgccaaaaattggaaattatagaaaaaatggacaaattcctagacacatataacttaccaagatgaattatgaggaaatccaaaacctgaactgacaaatagcaagcaatgagattgaggctgtaataaaaattttcccagcaaagaaaagcctgggacccaatggcttcactactgaattttaccaaacatttaaagaactaaccccaatcctactcgaactattcccaaaaataagaggaggagaaaatacttctaaattcatcatacaaggttggtattaccctgatactaaaataattttttttctatttccatttcaataagaaataagaaaaagtaaaacaaagacatatttgaacctaatatattcttcagtgatatcattcctttactgtaaggaatactttttttttcttttttctttttttttgagatggagtcttgctctgtcaccaggctggagtgcagtggtgcgatctcggctcactgcaccctcctccgcccaggttcaagtgatttcccctgcctcagcctcccaagtagctgggactacaggagtgcgccaccacgcctggctaatttttttgtattttagtggatactgggtttcaccatgttgactaggatggtctcgatggcctgaccccgtgatccgcccgcctcgggctcccaaagtgctggtattacaggcgtgagccaccacgcctggccggagtacttgtttttcaataccacaggagctatgagctggtcctccattttgtatcaaagaatgtgtccccaggtgacaagatgcagattccaagacattgaatcaatatgatgccaccatcgctttctttctgttctatgacatctttctagtcttaccttactatttccttggctctcagttggtttttcctgagttctcagaaattgaaataatacacactttgtagaaataagaatttcatgttagtcaagtctctaggatagccatgggctccacttaattatctcagaacttacagccccatgtcctctgctcactatccattgagatttatgtgttctcagacttcacagaaacttttctagctacttatgtcattctcagtggtaacttcatttatccacaatattaactaattttctcagtccaagctgttttccagaggtaatctccagtccccatgccgaaactatcattgtacttactgctgaaatgatagttccttcccagcaagaaggtgagattattgtacccagaatcttttctcagggttcaaatatccactttccccatggcaggaatgctgacactccagccacggttttgtaaatgtgaattagtaaataccaactattcccaggtgagtgttgtgggcagcaagctacccaggtgctgaggcaagagaccgagggcatgagccattccagtataataaaatatataaaacaacaagagttatactagatctagatcatagatgtaattatatatgaatatcattaatcattagtttgtagcaattactctttattccagtattataataatactcgctctataatcataacctagaaaaaaccaggccatacagagataggagctgaggggacacagtgagaagtgaccagaagacaagagtgcgagccttctgttatgtccagacagggccaccagagggctccttggtctagcggtgatgccagcatctgggaagtctggtctagcggtagccttagtgtcaaggaaaaacaaccgctacttagcggaccgggaaagggagtctcccttttccccggggggagtttagagaagactctgctcctccgtctcttgtggagggcctgacatcagtcaggcccacccgcagttatccggaggcctaaccatctccctgtgatgctgtgcttcagtggtcacgctcctagtccaccttcatgttccatcctgtacacctggctctgccttctagataacagtagcaaaattagtgaaagtactaaaagtctctgatatgcagaaataatggtgtaagctgtctctctctctccctctctctctctgccttggctgccaggcagagaagggccccgcgtccagtggacacatgacccacatgaccttacctatcattggagatgactcacactctttgccctgcctcttttgctttgtatccaataaataacagtgcagctagacattcagggccactaccagtctccgcgcattggtggtagtggtcccccgggcccagctgccttttctcttatctctttgtcttgtgtctttatttctacactctctcgtcaccgcacacagggagagacccaccgaccctgtggggctggtccctacagagtgttacaatcagaaggaaccagttctgctctgaggttgagacatactctgagggacctggagacatggtgcaacctcctctccttgccttatgcctctcctctatatttcctctgaaaccttctttgaatattcttccttccattactgactgaaaatattaagcctcacaaagtccactgtaagatctttaccagtgggaaatgaagaagactgtttaaagtatttgagtggccatttagtgtctttataacattttttggttatgcatttttgtctttttgggggcatgatttgcaaattgagtctctggtattttactaacttgtgtttgatgagtgaaagagttaatacttcctctcccattagtgaaaggaaagacacttcagaaacatgaataaaagattgtaaattggaaatagtaaggtaatcagatatgtaaagaatctaggccaggcgtggtggctcacgcctgtaatcccagcatgtcaagtgattctcctgcctccacctctctagtagctggaattacaggcacctgccactacgcccagtgaatttttgtatttttagtagagacaaggtttcaccatgttggtcatgctggtctagaactcctgacctctggtgatccacccacctcggcctcccaaagtgctgagattacaggcatgagccacagcgcccagcttcctgacatcgcttaatgcataatctcttcacagggtatttccaaagtccaagggctctttcataacacctacaactggttccatcagaaatgtttaaagcataacaaaatatgttatcatcgtccattttttctattgtctcaaaaatatctttgttctttaagcagcttcattgcaatgaaattcccaaatgtgggcgtggtggctcacgcctgtggtcccagcactttgggaggctgaggcgggtggatcatctgaggttgggattttgagaccagcctggccaacatggtgaaactctgtctctactaaatacaaaaattaaaaaaaaaaaagaaagaaattcccaaatttatccccatgacttttagtagttctgtctcatatatctctattaatctacaggtatgactttcctttttaaaattccttttttgtgcggggtgtgggacagggtcttactctgtcacccaggctggagtgctgtgacacaattacagctaactgcagcctggacctccctgggctaggtgatcctcccacctctgcctcccaagtagctgggactacaggcaagcaccaccatgcctggctaagcttttattttttattttttgtagagactgggtttcacaatgttgcccaggctggtctcagactcctgggctcaagcaatccacctgctttggcctcccaaagtgctgggattacatacataaccacaatgcctggccttaaattttattttatttttttattttttttgagacggagtctctctctgtcacccaggctggagtgcaatggtgcaatcttggctcactgcaacctccgcctctcaggtttaagcagttctctgccacagcctcccaagtagctgggattacaggcgcccaccaccacgcccggctaatttttgtatttttagtagagacggggtttcaccatcttggccaggctggtcttgaactcctgacctcatgatccacccgtcttggcctccaaaagtgctgggattagaggcgtgagccaccgcgcctggccaaaattttatttatttcttgaaattgtgtaatttttgtattagaatttattatactctaattttttgtgcatatctctgatatgatttaagttgtttacacatgtataagccataagcaaactagatattcttgaaatgggtgattcaggggtagtcccacataagtgtgtgattatgacacagccagaaacacacagttggattacattctcccagcatgctgtggtacagtctggaagcaaaaatttcaaagagtgtatgctcctggtgtgtgacaagtgcctgagggttatactgcagcacagcctatagacaaaacacatatcccagggaccctgtgtgacaggtgtgcagtatttaaagacctcagtccggcagggcacggtggctcacgcctgtaatcccaacgctttgggaggccgaggtgggtggatcacgaggtcaagagtttgagaccagcctggccaacatggagaaatcctgtctttactaaaaatacaaaaattagccatgggttgcgctcacctgtagtccgagctatgcgggaggctgatacaggagagttgcttgaaccagggaggcggaggttgcagtgagccaagatcatgccaccacagtccagtctggggaaaagagtgaccctgtctcaaaaaaaaaaaaaaaaatctcagtccatcctagaggtgcccctgttatacctataggactctgtgtaagaggcattgggtactggcacctattgacagcctgagccgacataaatatataccacactgacaacaaacccaagagggagagatgtgatccacacaaccagcatattcagaaccccaaggggctgttagacagaatggaggtggggtcatactggccacacagaagcacaaatgctactcagagacttgggcttttaaatttgctgattacaaaggtttagtgggagcataagcagggtataatcaagaaaattttactccacaatagatagaaatataccttccagtgtgtgtagtcataatataattggaacacacaattttaaacttctagacattactgtagagtcctatgttgattaagaatcatcacagatatttctagaaagaagaaagcaaaatattactgatagtgaagatgaaatatgcctatataacttgctgtcatgcaaggtaacatttaggtattgagattctttacatccctgattacattgccatttgtaatttataatcttttatttacatttctaaagcatcttgcttttatgtgcctatatatcatgctgtcatacaagataacatttagaggccaggcatggtggctcatgcctgtaatcccagaacattgggaggctgaggcaggtggatcacctgagatcaggagtttgagaccagcctgaccaacatggagaagccctgtctctactaaaaatacaaagttagccagctactagggaggctgaggcaggagaatcacttgaatccaggaggcagaggttgcagtgagctgacatggtgctattgcactccagcctgacaacaagagcaagaaactccgtctcaaaaataacaaaaatgagagatatcaggattataagtaaaacagcatagtaatacacttaagaatagataatcggtcagatgtggtggctcatgcctgtaatccctgcactttggagagccgaggtggatggatcacctgaggttgggagttggagaccagcctgacccttttttttttctagtagagacaggagaaaccctatctctactaaaaaaaaaaaaaaaaaaaaaaaaacacacacaaccaaattagccgggcgtggtggcacatgcctataattccatctactcgggaggctgaggcaggagaattgcttgaacctgggaggcagaggttgtgttgagccaggattgtgccatagcacttcacgctgggcagcaagagcaaaactccgtctcaaagaaaaaaaaaaaaaaaaaattagccgggcgtaatggcactgtaatcccagctgcttgggaggctgagccctgagaattgcttgaacccaggaggtggaggttgcagtaagctgagattgcctcactgcactccagcctgggcgacacagcaagactctgtctcaaaaaaaaaaaaaaaaaagccgggcgcagtggctcacgcctgtaatcccagcactttgggaggccgaggcgggcagatcatgaggtcaggagatcgaaaccatctcggctaacacagtgaaaccccatctctactaaaaatacaaaaacttagccgggtgtggtggcgggcgcctgtagtcccagctactcgggaggctgaggagaatggcatgaacccgggaggctgagcttgcagtgagcgaagatcacgccacttcctccagcctgggtcacagagcgagattccgtctcaaaaaaaaaaaaaaaaaaacaaaccaccatgcaatgataaataataatggatcattgaggaagaattcatgggacttcattacatagtcctttgtatttgtgtatatatttggaaaaatccattacaaaaggtacaatatgttcttgcatcaataactttatacaggcatactttggagatagaacaggtcaattttttttttttttttttgagatggagtctcactgtgttgcccaggctggagtgcagtggcgcgatctcggctcactgcaacctccacctcccgggttcaagtaattcttctgcctcagcctcctgagtagctaggattacaggtgcccccacccccgccaccatgcccaggtaatttttgtatttttagtacggacggggtttcaccatgttggccaggctagtctcaaactcctgaccttgtgatctgcctggcttggcctcccaaagtgctgggattacaggcatgagccaccgcgcccggccgacaggcttctttatcccataaatatctctaaatcccatcatcaaagaggcagatttgagaactgttctcccacctctgcacttggcagccttgtaaatacatgctttctctgctgcaagactcatcatctcagtgattggcatactgtgagatggacagaacaggcctggttctatatcaatagtgtggaggaattgtttcattttatagaccagtatcgtcagcttcctcaggaacctttactaacatggatagtgagaataactaacttaggggaaacatctttggttttaaataatgcagagtggaagaacatgtttgggttgatgtagtacctacaggtcactcttcaacaattgcagataggtatgtatcatccacacacacaagagtttattcctgaaggaacagccagcctgggtgggtgtataaaagctactctgaagtctgtctactcggaaaagcgggactgtctgactccccctataaatgccaagtggggctccccagatgaaccagcttaatatgcttcccatgcaagccatgtggaactggcattatgatgataggaatatttacctactgaatatgtttattacccaggtcatggtaaatgtcttggtttggggaaccccattttcttgggcaccttatgtaaacttactgctgcaaaattgagctatagtcagtcttaccaaatttgcttcctattatgggcctttcagatgctaataaaaccattagattaattaataagatagacaatgatgaaaggtacaggggagagtcaaacagctccttccaggaaggtagaaatttttaaatagttataaagaaataagacaaataaagaaaacatggataggaatgaaactaagaggaaaaagaaaagggggaaatcatgatactcatcccagcatggtggaaatctttagatggctattagatggaaattagatgaataaaataaaaactgatcggattaaaacaaaattctgaatataacactattgaaggttgggtggaccaaaggaagttcctgttgatcccccaacattaaagggccttaagctaagttgctgtagttcctgaagtttggataaattttaaaagccagaaggtaaagatataatgagaaaccccacctggaatgcctagggtgatggttagactggttaatcaaggtagcacttggaaaaaaggccaaagtctcctggcctgaaccctgggtggaaacctgaagacatctgcacaagaaagggtaaaatggtctggagagaagagtcctgggactacaacataaagtaaaagttgacaggactatgaaagttggaatgttaaacatgcttttttttttttaagttgtactaccaataaactgagttctttccctactttgtattggtcacaaaaaaaagaacacccaatttgggaaaaaaaaaaaaaaaggcaagcaagttttatttctgagcagaaatggagaatgagtaagctcttgctctaaatgcctcttctccctgaacatagaagacataggttttttaagaactgagcggctgggtacagtggctcatgcctttaatcccagcactttgggaggccgagacaggtggatcacctgaggttgagagttcgagaccagcctgaccaacatggagaaaccccgtctctactaaaaatacaaaattagccaggtatggtggctcatgcctgtaatcccatccataacattaatttattaggcaaaacactccttgccatggaaacagaaataaagaatagtcacaaaaaaaaaaaaagaaaagaaataaataaagtctgttttatctaatacaaaaaaaaaaaaatagccacttcccagcaataacatgaactcctggatttaagacacaaccaatatcaacaggtggagagcatcttctgcatacgtgccccacctttgaaaactgcagccatttatcactaccaaaatagcatttctttcattggtcttcctgtaagattgataaatcttagataaattaatccagaattaattgaatataagttggaatctcaagcgagggatactaagtggataaaagtgttgctcaatgtactggacactatgattgattttataggcaggagagttgtcttctgtgggaatcacagacagagattcagcatgtattcctgctttagggaacacaacatttctcctctatcttccttgtcttgtcctatctggattagttctctcttgtccctgacagactgagaaactgactctaatgcctcagagtgcattcatgtgaatttataacacaataatgtttatcagcctctgctgccagtaccgggattttgcgactgaaagactgttcaaaacgttatgataatttggatttttagtctttgggggcatcctaaataataagtttagcatcggagagctcgagttccccaaaatctaaaataatattttttcaaatacttgagtgatcagttacagacactaatctccaaaaatctcaatacgggttctaaggctaggtgagactatcctctaccctagaaggacatgcactttaaggacaggccgctgagatggagctgggcctttcctgcaagtaagtgaacgtgatggtagggtatacctgacagcatagtttgacaggggatatagactttcaaggagaaaatagacatgaaatagatacatgcagaagtatagtcaaattgagggaagatgacacttaggccagagtagtgtttattcaccactctgtgcaatcaagcgcctctgagaaggccttctttaccgccttggaactgtcttggaacctgaggaaactacataacccagaaatctctgcgtcgaatgacagcgcgtcagagccaatgagggctcaaaataaaggcgtttccgcggaaacagtataaaggtgggacttccggcgtcctctactagtggccattttgattggtgttgggtgtattttccagtgagagaccgcggagtgttgggtcgtgtagaagtgactgaacccagaaggtggagacgagacgttgtcccgactgcacagaggctgctctgcagctccttaaaggcgctaggcgtgacccgcaccaaggccgggatcgggaccaccgtgcccgggtacctgcactgctcgccccctcctttcgaccccgctttccccacccagtcggatggcggcggccgcgctgaggcccccggctcaggtaattgtggcgtcttccgtgccctcaggtcacctcatctttacctaagtccaaaagcagagaggaagcggcgcctgctcaaggttttacaccctgaacccggcgtcgggacactgaggcgctctctatgggcccccgtttttgacacccgcgggatgcgctcaggagagctacaggcacagggagcggtgcaggcaaaggcctggagatgaactgagccgagaggatcgtaacctagggtccacaggcacctgtcgggagcaaagtgtgaggcagagctcctcctggaagagcaggctgaggaccgtgtattcaccctgagaacgctggaagccatggacagcttccaacaaaggaaggaaaagatcaatgtccaggctttaaaggtttcccaaagtccagtcgaaaaagaacacaggggatgacttttgggccctgggaggttgaattcttgttcaacctctacagatcagataggtgctaagagatgacattttgtactgaggcgctcagttcagacaaccaactcgcgtttacctagttacagggccaagaaagagttcagggaggcctgagcttatcaaatctcatcagggatacattcttgtagcttgtgcctctcctctcaggaactcctggctgcagaagcacttgcagaacctccgcagggaagcggagggtgttattccctcactggccctaactcctatccacatgctctttagattgggatgtcctgggattcttaggtacctttttttttttttttttaagttttttgatatgggaaccctggaggaaccttaaacccaggatccaaagtctgtgacacaggatatatggaggtattcccatttctgtcaaccagtataaacatacttggaaggttaacccaggagttagtaccaggatgtgaaatgcttagaggtgaaactgaccagagggaggaggtgatgttgccacagtttcatctggctgtagtctcctctggctgtacagtggagaacagactgtggggttgagagaggaggaaataagatgagagttgaggcttttgccgtaatccaagtgagggttaacagactaagattcatggctaaggagatgtggctggattcaaagttgatattttgttacagcatctaggtttcctaatacacaaagtaagggcatgaagagagcaatcaggatcccgaggtttttggtcttagtagctgtagctatggaagctgcatcagctgagatgagcatgttggtaataaacataattagaatattatgcaaatatcaggatgactgttatggccatatgaagagtcagagacgaataagtgtaggcatcaaatggctatggacatgcaggttggggtatctggaaagggattgacactggagacatctaatatatggtagctaatgtgtatgctatggtgagtgagccatgggtcacattaaggagaacacacttcagattctggtggtaaatcttttaggggaccagaaagcagtggttgaatgatgaggactgcatctgttgcttgggtccctgggtaatgttactgggcttcctaaacactggagaggtaggtaagtgaccatgatggtagggtatacctgtcagcataatttgacaggggacatagactttcaaggagagaatagacatgaaatagatatatgcagaagtgtagtcaaattgagggaagatgacacttaggccagagtggtacttattcaccactctgtgcaatcaagatttgagatgactttggtagtgtgtggggggtttcattacacgtgctgaatatgctcagggagaaatatggtcatctgtgacagtaggtcttgggccttaaatggattaaaaacaggactttttttttttttgagacggtgtctcactctgtcgcccaggctggtgtactggtgtatagtggcgcaatcttggctcattacaacctccacctcccaggttcaagtgattctcctgcctcagcctcccggtagctgagaatacagttgcgtgccaccacgccccactaatttttttttgtatttttagtagagatgtgatttcaccatattggccaggctggtctcgaactcctgacctcatgatccacctgcctcagcctcccaaagtgctaggattacaggtgtgaaccaccatgcccatccaggactgctctttaaatggcaatggtattaggtgaatggaagttggtccgtgttgctgaagggtaagccattgtagcacagaagtggaataagaccatggatatctgaagttacatgtggttttgcatggatgtggagtaatgcaaggaggcattcatagaattattagggactaccactgctaatgggaaccatggtcattttgtgttattattggatcctgtttgaatatgtgaagcatattggatgctgtcagccatattgtggtataaagccaaaaatggaggcccaatatgatgtgtcaccttgacatctagtgatattggtatgacctcaaatgacctgagaaccaattcccttcccactaggctcttttagataataatcagcatggcctaataatccttttattagggagaccaggcagaattcctggttattatactttgtagtgagtttcaattttatccttacccacagtgttattcaaacaagccagttgcatcctcctaagggattcgggggtcatcacaccctcttcattttaaaagcttgcatatcatagtttctggttatgcactcttatccatagtgcaacccctatgtggtccttcatgatgagggatgtcctcttctagactttgagtgtatttgatttttaaacatatttatagcacctgtctagtgtttgatgtcatgtgtttggtcattaatataactgtaaggtgaaaatctcacccttactggtagaaggaagaagagggtataaacatactttaacttgtggggaggcagaggccaatgtgggaggcagtttagtgggggtggccatgggcatgtgtctgtgcagtctaaagaatgatgtgtattttggcctagcacagtggctcatgcctgtaatcccagcacattgggaggctgaggtgggtgaatcacttgagctcaggatttcgagactaacctgggcaacatagtgaaaccttctctctaccaaaaatacaaaaaaaaaaaaaaattagccggcacggtggcatgcacctgtatcccatctactcgggaggctaaggccagagaattactcgagcccagtagacagaggttgcagagagctgagattatgtcattgcactccagcctgggcaacaggagtgaaaccctatctcaaaaaaaaaaaaagcaaaaaaaaggaatgatgtgtatttagagaaggagtatgtctgatagactgaggatgctgcattgggatttacatgacttcatctctaccaggggcattggctatcaggaagttatggaccgctttatatcagcaccaaaacatagaaatctattgtttcacccacttcttgtggctgatggctgtacaccatgaccagtgagcccatgagaagatagtgacaccagtgggcctagtttctccttgtagtttaggaccttgggaggaggaagggcaagggtggataagtggatgagcatatggagtgtttgtggtttcatctgtcatcatcacggcagggcactgtgacctttgaagatgtggctgtgaacttttcccaggaggaatggagtctccttagtgaggctcagagatgcctttatcatgacgtgatgctggagaacctgacacttatatcttctctaggtaaggcactcacactcttctctatgacctcagctattgtctgtctgtccccatcttttttccccatggcaagactgttttcctcacttcaggagcctgggcacaggttcctctgttagttccctgggtaggttctatgtggtatgtaggactgaggtgtgtgcactgccctctctctccttgagcagccccaacacctgctttgctgcaagctcccagagaaggagctttacaggcaccataatgcatcccaccttgcttgccctctggctgttgagtaatttttctagatcagagactggtatgcacaggttctacttccttgctctaggtgacatttattcatgactgcctgtgctaggaattcctcccatcactgatgttctcaatacttacatgcaccataggttgttcttgcaagaccctccttataaattatcttgtttgttttgttttgttctgttttgttttcaaagtcttaactctgtcacccaggctggagtgcagtgctgcagtcatagctcactgtagcctcaatctcccaggctcaagcaatcctccttcctcagcctctagagtaactcggactagaggcttctgccatcacatcccactaatttttatttttatttttaatagagatgaggtctggctgtattgcccaggctggtctctgactcccaacctcacgtgatcctcccacctcatcctcccaaagtgctgggattacaagcatgagccagtgtgccctgagtattttttgcttttttgtttttttttttttcagacagggtttcactgtcatccaggctgcagtctactgatgcaatcatggttcacttcattctcagccttctgggctcaagtaatcctcccacctgactcctaagtagctgggactacaggagcatgccaccctgcccaactaatttttgttcatttgtatttttggttttgttttttttttttttttttttttgagacggagtcttgctctgccaccaggctggagtgcagtggcccaatctcggctcactgcaacctccgcttcccaggttcacaccattctcctgcctcagcctcccgagtagctgggaccacaggcacatgctgccacacctggctaatttttttgtatttttagtagagacggggtttcaccgtgttagccaggatggtctcgatctcctgaccttgtgatccacccgcctcgggctcccggagctgggattacaggcgtgagccaccgtgcccggcctcatttgtttgttttgtagagatggtgtctcattatgttacccaggttggtcttgaactcctagggtcaagtagtccttccagtttggcctcccacagtgctgggattataggtgtgagccactgcacctggccaaaaattatctttgtagtatttagttttctttcctatgggctatcatgtgctgattttttctgaactgttggttggctattcttctctcttgtctttctcttattctttatgtcatccatgtctcatgtaaattccatgtatatctttgcagtgggactgagagttctcagtgatccagaagttgcagctaaacccaggctcagcatgatgggcccagagggaggccacctctgaggagtaacaccctggaggaagacataacattagggatttaggaaagtcatgctagaagctctctgatttcacaagtatttacctggcaacatgacgagccatatgctgtttctgtcttccccattcttgagagtttcagacttcaccgttctataccctgtcacttctcctctgatgccagcccaggactaatcttcacatctctggatcccacctggacccatttttctcacatttccatctgcagtggactccaatactggcatatcaattttgtattaggaagtgtgtacacattgctaagccatacctgaccaacagctgctttgttgtactcgtattttcttgtgacacacaaacaagtgtatctttgttgtactcgtattttcctgtgacacacaaacaagtgtatctaacagaggtattactccatggaaataattgcagaaacagaatgttgcctttaggttgaagataagtcttcttcatattactgggttagaatgattacagaatgtagggggccacatgatgtgaaggagccaacaatacatgcactacaggaagcagaggcaattccttcctgtgcaaacatctaaaggaccttcataaagcatgtgggtgctatataaaaggatatgtctaggcccaagtaaatataagtacaacaaagcagctgttgatcaggtatggcttagtaatacttcccttcggaagtaccttgcattttaccagcattttatttcttttaggttgttggtatggagcaaaagacgagacaccttctaagcagaccctttctatacaacaggagtccccactcaggacacattggacaggtgtatgtaccaagaaggtccacctctggggaatgtgtggccctctcctgggagatatcttacaccagggaacacaacacaatcagaaattgaatgggtttggggcatatgaaaaaaaattggatgacgatgcaaaccatcatcaagaccagaagcagcacattggagagaaatcgtacagaagcaatgccaagggaacatcttttgtaaagaactgtaaattccatatgtcacatgagccatttatctttcatgaggttgggaaagactttttgtccagcttgagattactccaacaagaggacattcacacttcagggaagtcaaactttgaaactaagcatgggataccccttcagggtggaaaaactcattacatctgtggagagtccacaataccgtttagcaacaaacactcacttgtccttcaccagagacttctccctagagaaggaccttatgtatgcagtgattctgggaaattcactagcaaaagtaatagttttaataatcatcagggagttcgcactggaaaaagaccttatcagtgtggacaatgtgatgaatcattttggtataaggcccacctcactgaacaccagagagttcacactggagaaagaccttatgagtgtggagaatgtgataaatcttttagtcataagcacagtcttgttgaccatcagcgagttcacactggagaaagaccttatgaatgtgacgaatgtgggaaatcttttagccataagcgcagccttgttcaccaccagcgagttcacactggagaaagaccttatcagtgtggagaatgtgggaaatcgtttaatcacaagtgcaacctcattcagcatcagcgagttcacactggagaaagaccttttgagtgtacggcatgtgggaagttatttaggagcaactcccacctaaaggaacaccagagagttcacactggagaaagaccctatgagtgtaaagaatgtaggaaatcatttaggtacaagtcacacctcactgaacaccagagagttcacactggagaaaggccatatgagtgtagagaatgtgggaaatgttttcatcaaaagggcagtctcattcaacatcagcagatccactctggagaaaggccacatgagtgtggagaatgtgggaaatgttttcatcaaaagggcagtctcattcgacatcagcagattcactctggagaaaggccacatgagtgtggagaatgtggaaagtgttttcgtcaaaagggaaacctcattaaacatcaacgagttcacacgggagaaagacatcatgaatgttgaaaatttggcagatctgttggtaaaaagagcaccctcattcaacattcgtgagatcacactggaaagcacttatgagtatggagaatgtgcaaaatcatctagccaaaaggttggcctcattcaacaatagcaagatcacactggggaaaggctttctgagtgtagagaatgtatgaaatcctgtacatagaagttttgcctcaccaaataccagaagggtcacactggagaaagaccctatagttatggggaatttgggaaattacctaacaagaagtcccacctcactgaacactactgagttcacagttgagaaaggccatatgactgtaaggaatttgtaaaattatttagccagaagagctgcattactattcatcagataatttacaatggagaaaggccacataataatttctcacataataaatgtgagaaatcatttccgtacagctctgcgctccatgttcgtaagagttcacactggacaaagccttatgagagcagcgagtagaaaatcctttgtgggaaaactctggtttcattaaacacaggagagttcatgctagagaaaggcctcaacagtgtagcaaatatggaaagacattcactagaagctctgccctgcaagttcacactagagaaagcccttctcagtgaagtaaatttggaaaattgattagtcaaacctctatgctccttcaaaatcagagttcacactggatcaaggctttatggtgtgacaaatatggcacattctttatctaaatgtctaacatattatgcacagacaagctcctgctgtggaagtgccttttgagtgcagagcatttgcgagggcttcactcttctttcactggataccagaatgttgacaggagaaaaataacatagatgtgtgggaatattacttcttgtccagtgtaactgtgggagagagcccttatgaggacaccatcaacctatattgaatgtcatatgtccagtagctgcataaattccaggtatatgggagctgtattgcatttcttatcctgcgtatgtccttgccagatttatttcattcttaggtctctggcaaaagccatttcatctctaccacttggcaggtacctacagtgcatcactcatgcactccatcatattccagaaaaaaagttcaagttgtctcccattcagcagtggtatttttgagtagcctctgcactcgttcctttctcatttctctatgaagagttaggccatggacctgactcagttctggcctagagcagaagtgtccaatcttttggctttcctggtccacattggaagaagaattgtcttgtgccgcatatgaaatacattaacactaatgatagctgatgaacttttttaaaaaatcacacaaaaaccctcataatgttttaagaaagtttacaaatttgtgttgggctgcattcaaagctgtcctgagatacatgcggcccacaagctgcgggttggaccagcttggcctagagaatttttctgattacttgacaagatgggctgtctttcctaggaatctcatgattgtcatgattcttaaaatggaattttccagcctcttaactcaccaacccaagtacaagctgcctctcattgttctggtttctgctatgatgaagtccttatttaagcttccttcaatcttgggaattgtattgactgtattgtgtgaattgtatactcactgcattgtgtggcttagatacaacatggttctggtaccatgaaggattctggtaccatgaaagtttgttggggttactaaactgtgtgactcttagggaacagtatgaaggcagaatatagctctgcatttgtggcctagtttggatggctgcctaaggcctccaaataaagacttcagggctttgtgatctttatttttagatgaaatagtgcaataatatgtgttttcataaatcaacctgagtaggggacagttttagtgacacactttggtgcttctgagaacagcacaaaattattctcttgtttataatggatattgcattctgctcagtactggtgagggaaatctgttctcaagtcctacagtgcattcatgtgtcctgaagtccagaattctgtaggatagtgtcctacgttataagcctggagaaagaaatcataattctttaatttttatttttttagggaaatgatgtcactctgaaactcaggctggaatacactggcatggtcatacctcactgcggcctcaaactcctgggctcaagtgatcctcctgcctcagcctcccgagtacctgagattagcccaggtaatttaagaattttttatagagatagggttttgctattttaccctgactgatgttcaactcctggcctcaagtaatcctctagcatacgcccttgaaagcactaggattacaggtgtgagccaccatgcccagcccaaaaataatttttgtagaattagcatttctaggtagtgaagcagactgcaacagaatagttgggatatactttttttaaaaaggcatccacaatgattcagtcactatgtctgtgatggacaagcaggtacagaaattttcaggacctccataattatgaatctagtgtagcttaggtcattgtcagactaaatctaaaggttttgtggatttctgtagcctatctgggctgcataccaaaaagccatccctgaattagtaggaggaagaggatagggagaaaggaaatctcttagtccagtgatgtggcctttgcaaccagccagcattccaatttaatcaggtggaaatgatcttcctggctcataagtatttggtatcacacaggctaattgccccccttagggcgtgatgagagttaggagagtcaatgtaaaatcacataacctatttgtcaaaaataatgttaaatccagatagttctttcaaattaaatttttaaagctgtaataagactgggcatggtgactcatgcctgttatcccaacactttgggagtccagggtgggagtattgcttgaggtaagaagtttgagactagcctgggtcccatagtaagaccctgtctcttaaaaaataaatactatctttctctctggcctctccatgctccagacaatcactgaattacaatatttgcttaacagtagattaatgtcaattttctggaattttatatgactgatataacatgtttcctcttttcatacctgagtactctcctgagccctatttatttagatgttcttcttttttctttattattatttttatttcacatagcagggatgcatattttgacattcatcaatcatgatatatgagtagttcattctttttatcttagaatatgacatgctatggaaatcactgtatacgaattcatctgcttatggatatgttattgcttcttatttttgtctgttaggaataaaactgcttgttaagcacatttgaatgcaattcttcatatagataaggtttcatttctcttgtttgaatgccttggtgtgcagtgcccaactcacatggtagatgaatgtatacccctctcccaactccaggccgcacagcttacagctccaagagagactccttccctccacttgaggagaggagagggaagaataaagaaaactttgtcttggaacttgttccagctcagctacagtaggatagggcaccaggctgaggcccctattctaggccctagctctgaatgacatttctagatataccctgggctagaagagaacccacttctttgaaagggaggatccagtcctgggaggatccatcacctgctgactaaagagtcattgggccctgaataatcagcagtaatacacaggcagtactcaccatgtgccattggtgagactcagacgctggcttcaggtgtgacccagcacattcccagctgtgatggctttcaggaatgactcctgcttgagaaacagaagagtaaagaagactttgtcttaccgcttagataccagtttggccacagtagggtagagcaccaagtaggctcttagggtccctaatttcaggccttggctcttggatggccagaggaaagcccactgccctgaacagtgtcccaagcctggcagcactcaccacaagcctgtgagtcccacagtcctggactggtgaggaccatggggagagacacctctgcttgtgaaaacaggagggaagagtgagaaggattttgtcttatggcttgggtgccagttcacctgcagtagaacaccagatagattcctaaggtttcccactacaggctctggctcgcagatggcttttctgaatgtgcctaggatggggaggagcttgccactctgaagggaaggacataaacctcgctggttttgccccctgctgattgtagagtcctagggccttgaacaaacagggagtagccaggaagtggtcagtatgagccttgggcagcacccagttctctgctggctacaggtctgaccccacatagtcccattggtggtggcacaggggtacttgtgttactgctcctccagctaaaggcagctcagcacaaagaaactttggaaacctgccagcaggagactcaatgacccccatgaacacttgagctggcagggagagctgcttagagaagtggtagggacagaactccagccagtgcagagcccagaggatttggggtgggagcatctctagtggagcacagctagacacgcccatatttcaaggttcgccttgcttccctaacagactttagccctagggaagtcagacctgatcagtgcagggcgttcttgccgataagttggggatggttggacctgagcacctcttggtcagctggcctctcccagggctccaggctacccacacctgcttgcagtgcgacctcggttgcccaggtggggtcccttatgggggtgtacatcatagctcctgtgctggtgaactgcagttgataaatcccatagtcgtgcaacagcccacctgcaccttcccaaaactgcggcctctctgagacactttgcctgcatgcattcacctatggccacccccgacgttgctttgccagcatatgtgcatgcaagtggaccttgccttctcttttccaccagcatgcgtgtgcatgtgcaccctgtcatgctacagctgccagtgtgagcacacctcatccccccaacttttcgctgcaccaccattgctgtcagagcatttgcgatcccagagactgccagcccgcacctgccagcaccccacccctggaccagcacaaaactacacagacgagcagacacactccactcaccagtatcagctgctacccacgtgaatgcatgcacagagggtacaaacagtcctgcacctgccagcaccttgcctccatattaactccactgctggtgtgaatgtgtactgggacatcaatggaacccccttccctacccccccatgttgtgctgccaccaccagcactgtgaacactcacgtggaggctggcacccctacacccaccagcactccatcgcagccaataaacgtacaccccaccactgccattgctgctggcatgtgggaacaaggatggatcctgctgccaccaccctaagcactggggctggcactgcccttcagagtgttgttaccaatagtctgggaacaacttgaccctccagcatggcaggtttctgacctccagggatcataggacaaagctggatgcctgataccaggccccgtgtattagagcacacagtctagtagtcctgagctgagccttggacccctaaaatgctccagaaattaagacagttgactggagccacattataccacaaactcttaagggcaccaaaaaggataaaagaaaaagaagtccatccaaagttcagcaacttcaaagattgaagaaatatcagccaacaaagatgagaaagaaccagggcaagaactctggtaaccgaaaaagccagagtgtcttcttacttcaaaacaaccacactagttccccagcagtagttcctaaccagactgagatggctgaaataacataaataaaatccaaaatatggataggaatcaagatcattgacatacaggagaaagtcaaaaactaatccaaggaatctattgattacaataaaataatacaggagctgatagacaaaatggcctttataagaaagaaccagactgacttaatagagctgaaaaatgctctacaagaatttcataatgcaatcacaagaattaaccgcactgtgggaggccaaggtgagcagatcggttgaggccaggaggttgagaccagcctgaccaacatggcaaaaccctgtctctactaaaaaaataataataatacaaaaaattagccagttgtggtggtatgtgcctgtagtcccagctgtttgggaggctgaggcatgagaattgcttgaacccaggaggcagaggttgcagtaaaccgagattgcaccactgaactccagcctgggtgacagagtgagattccgtctcaaaaataaaaatcaaaaaaagagagaatgctgaatatgggatccagtctcttttgtcttgtaggatttctactgacaggtctgctgttagcctgacagggttccctttataggtgacctgtcccttctatctagctgcctttaatattttctgtttcatttcgacctggaaggatctgatgactatgtgtctcagggatggtcttctttgtagtattttgcaggggttctctgcatttcctgaattttaatgttggcctccctagcgaggtcggagaaattttcatgagtgatatcctgaaatatgttttccaagttgcttggtttctctccctgtctctcaggcatgccaaagagtcataggccactttatataatcccatatttcttgaaggttttcttctgtgttgttttttcttttcttttcttttttttattttgagactgagtcttgctcttgtcgcccaggctggagtgcaatggcgcaacctcggctcactgcaacctctgcctccctggttcaagcaattctccggcctcagcctcccgagtagctaggattacaggcgcctgccaccacgcccagctaatttttgtatttttagtagagatggggtttcgccatgttggccaggctggtctcaaactcctgacctcttgatctgtccgccttggcctcccaaagtgctggaattacagatgtgagcgaccgcaccaggcctgttttttattttccctgagttgtttcagagagccggccttcatgctctgagattttttcctcaacttggtcaattcttgttttttttttttttctttttttttttttttgagatggtgtctcactctatcgcccaggctggagtgcagcggtgtgatctcagctcactgcaagctccacctcccgggttcatgccattctcctgcctcagcctcccgagtagctgggactacaggcgcctgccaccacgcttggctaatttttttgtatttttagtagagacagggtttcaccatgttaggcaggatggtcttgaactcctgaccttgtgatccacctgccttggtctcccaaagtgctgggattacaggcatgaaccaatgcgcccggctcaacttggtcaattctgttaattcttttttttttttcttttttttgagacaaagtcccactcgtgaggtctggatcaagaccgcttttcgggtgacagtgtcaattgtctacagacttagggaaaattttaatggccacaccagtacagatacaggtggctccaaataaaccacttcccaatattaaacagtattcattgaagcaggaagctataagctgggtacggtgttgcacacctgtagttttagcctctgtaagcagacagggaggatctccatggattataggaatataatcaacttgagcaattaccctgttttacagcctcctccccttctgcctgtacctctccaaaccatggtttgaatgcagtcaccttgttgggctaaaacagctcctgacagaccccaagcagtgtagatgaacccaagttaactttccttattaacatgctgaagtctccactctggaaggagctatagcttcattaccataacatgctttctatgtgctggtatgactcactgcatctgtgcaactgggaccccaattctacatgcactgatgcaccttctcccatcaccattataccataaaactctcctgttacttgtcctcagggagacactgctttggagaatactcccagtgtcctctttacttgagccaagtaataaaagtattgatcaatacctgtgttctctggccgggcgaggtggctcgtgcctgtaatcccagcactttgggaggctgaggcggatggatcacctgaggtgaggagttcaagagcagcctggccaacatagtgaaaccttgcctctactaaaaatacaaaaattaactgggcatgatggtgggtgcctgtaatcccagctactccaaaagctgaggcaggagattcacttcaactggggaggcggaggttgcagcgagccaagatcccgccattgcactccagcctgggtgacaagagtgaaactccgtctcaaaacaaacaaacaaacaaacaaaaacctgtgttctcatggaaagtcatttgttatgcaccaggtgaatgaacctggtatttttcaggtaacactactcaggatgctgaggcaggaggatcccttgagcccaggaatttgaagccaccctgggcaacatagggagacatcatctcaaaacaagaagctataataggaataaaacaaataaccaaagattaccttgaaaagggattgattatcccttccaccagtcctaatagtcccatcttcctgacacaaaacctcacaggaaaggatgaagatttatacaagatttgagaactattaatactactgtgattcggccgggcgcagtggctcacacctgtaatcccaacactttgggaggccgaggcgagcagatcacgaggtcaggagatcgagaccatcctggctaacacggtgaaaccccgtctctactaaaaatagaaaaaaaattagccaggtgtggtggcgggtacctgtagtcccagctactcgggaggctgaggcaggagaatggtgtgaacctgggaggcggagcttgcagtgagctgagatcactccactgcactccagcctgggcaacagagtgagactctgtctcaaaaaaaaaaaaaatactactgtgattcctcatcaaccagtagttctaaacccccacactcttttatccaatgtacatgtaaactgtgaatatgtcactggtgttgatttatgcagtgctttttaggcataccaatacaccctgacagtatttgtttgcctttacctagattggatatcaatatatctggactgttgtgcctcaaggttacaccaaaagcccaacttatttttcacacatattaaaggctgacctagctgagctaaatttctcttgttatgcttctccaatctgcataattataaaaaggactccttgcacttcctggaacaaaaagcaaaaagaggtcataagctgtctacagaaaaactccagttttgctttatgagctatctacagaaaaactccagttttgccttacagaactaaaatatttggaacaattaattcctagggagaaactacagatacatctggattgagtaaccggacttcttggataccctactccaaaaagtaaaagacagctttggccaggcacggtggcccacgcctgtaatcctagcactttgggaggctgaggtggatggatcacctgaggtcaggagttcgagaccagcctgaccaacatgaagaaactccgtctctactaaaaatacaaaattagccaggtgtggtggtgcatgcctgtaatcccacctactcgggaggccgaggcaggagaattgtttgaacctaggaggcagaggtttcagtgagccgaggtcgcagcattacactccaccctgggcaacaagagcgaaactccatctaataaacaaacaaacaaaaaaaagacaacaggattttaggcttggctgactactgtcatagctggatgtccaatttttctctaatgccacagactttatatgcattgtagaaagatcagcctaacctcatacactggacatcagaaggacaaataataaataaagaaaaatcttacaagcccccgctttggcccatgcaaattattagctgctgtttttcctttctttgttttttgcgattttttgttcatgtaaggcatggcagttccctgggtgttctaattgaaaaacctggaggacaatgtagggctattggttattatagtcagcaattagaccatgtagtacatgggtgacctctttgtctgagggccatttttgccactgccatgctccttacgattactcagaaaattgtaatggaggctcctcattctatagaagctcttttgaattcacataatacacagcaattttccattaatagattggtttcttatgacaaacttacactgtctgcttcatatgctgccctctctatctgtaatactcttaatcctgcagtgcaacttcctgaaacaacagatgaaatatttcatcactgtattctactcacagaattggtgtccagacaggatttataggacacatcatgtaaaaatgttgatattatctggttcacagatggatcggatctaaaggatacattttgaaaatactgagcaggctacaaccttgtgtctcttgtggacatcagaaagagcaatcccaccgggtgcggtggctcatgcctgtaatcccagcactttgggaggctgaggcgggcggatcacaagttcaggagttcaagaccagcctggccaatatggtgaaaccccgtctctactaaaaatacaaacattagccgggtgtggtggcaggcgcctgtagtcccagttacttgggaggctgaggcaggagaatcgcttgaacctgggaggcagaggttgcagtgagcctagactgcgccactgcactccagcctgggcaacagagggagactctgtctcaaaaaaaaaagcaaaaaaaaaaaaaagccatcacttgcctcaagtaaaatcagcacagctagctgaattaacagcactcaccagtttgtcaactggccaaaaatcaaatggataatatttatacttaaaggtattatgctattggtgtagctcatgaccttgggatgttatggaatcaggctttttttttttgatacagaggcttgctctgttgcccaggctggagtgtagtggtgcaatcttggctcactgcaacctcctcctcccgggttcaagcaattctcctgcctcagcctcccgagtagctgggattacaggcgctcgccaccacccccggctaatttatttatttatttattttttagatggagtctcgctctggctggagtgcagtggcgcaaactcggctcactgcaagctccgcctcccgggttcacgccattctcctgcctcagcctcccgagtagctgggactacaggcacccgccacggcgcccagctaattttttgtatttttagtacagacggggtttcaccgtggtctctatctcccgacctcatgatctgcccacctcggcctcccaaagtgctgggattaaaggcatgagccaccatgcctggccaatttttgtatttttagtagagacaggttttcaccatgttggtcaggctggtctcgaactcctgacctcatgatccgcccccccaccccccacccccccactgtcccccaaagtgctaggattacaggcatgagccactgtgcctggccagtgaggttacttaacctcccccagatatctaattaaacatggctctcaagtttctgatcatttagaagccatccgattatcaaaaaagaatgttttattaacgttcctgaacattcaaactcacctctccaaagagtaaaaaaaaattatttcgcagatgcagcagcaaaaagactctcttgacaccaatatcacatgaaactataaaagtcactacattcaaaataagtgccattgaacaggaactccaagggattcaaaaagaggcttcagataagaaaaagtagatatggctaacaaagcggtaatgcttttcccccatttacaaattttggtgtggacccaacaggagacccatcttgcctttgagatttcaatttcttatggtacaacatgtttatgagccaactcacgggaaatctgagaaaatgattgtttggggaaagaaatactactggaaaccctcacctccattactgaataaagtttacactaaatatccaatttaatttatacaaagcataatccaagaaagcttttttttttttttttttttgaaacggagcctcactctgtcctctgtcaccccggctggagtgcagtggcgcgatcttggctcactgcagcctccgcctcctgggttcaagtgattctcctgcctcagcctcctgagtagctgggattacaggcatgcgccaccacacccagctaatttttctattttcagtagagacggggtttcactatgttggtgaggctggtctcgaattcctgacctcgtgatccgcccacctctgcctcccaaagtcctgggattacaggcatgagccaccgcacccggccaacttttttgtttgtttgtttgtttgtttgtttgagacggagtctcgctctgtcccccagcctggagtgcagtggcgtgatctcggctcactgcaacctccgcctcccgggttcaagccattctcctgcctcaggctccggagtagctgggactacaggcgcctgccaccacgcccagctaatttttttgtatttttagtagagacggggtttcatcatattagccaggatggtctcgatctcctgacctcgtgatccgcccgcctcggcctcccaaagtgctgggattacaggtgtgagccaccgcgcccagccaactttttttttaagtatagaaaattttacaggttgggcgcggtggcaggcgcctataatcccagctgctcggggggctgagacaggaaaatcacttgaacttggccaagaggcggaggttgcagtgagccgagatcgcagcaatgcactccagcctgggtgacagagcgagactccatctcaaaaaaaaaaaaaaaaaaagaggtggagatttcccagaactgaggttccctcccctttttagactatatagggtaacttccaaacattgccagggcattggtatactgtcatggcgctggcgggagttagtatgctaatgcattataattagcgtataatgagcagtgaggatgaccacaggtcactttcatcaccatcttggttttggtgcgttttagccagcttctttactgcatcctgttttatcagcagggtctttgtgacctgcatcttgtgccaacctcctatctcatcctgtgactaagaatgcctaacctgggaatgcagccgagtatttctcagccttactttatccagcccattttcaagatggagtcactctgattccaatgccactgacaatgataagcacttgccagcaaagaggtgaacgcatggatttaaggcacttgaaatatctcagtgtaaaagcaccctgtgcatgtagcaggacgagccgcagacaaaacctctcagacaccgagttgcagaaggaagggctttattcagctgggagcattggccagctactgtctcaaaatctgagctcccggagtgcacaatttctgtcccttttaagggctcacaacactaaagatttcacatgaaagggtcgtgattgatttgagcaagcaaggggtatgtgacaggggctgcatgcaccggtggtcagggaggaacagaacagggcagggagtttcacaatgttcttctatacaatctaaggaatctatgaataacatcggcttctaaatcataagttgatttttaactactgggtttaggccaggcgggcctaggcctggtttcgggcctggcgcggggttgcctgtctttggttttacttccttgttgtttttactgaatataaaacaatgtgagagggtctctctcttctctcatgcatacatactccatgtttgaacaccgcagccattgtcctgtaacataatagcatttgtctcattagctttttgatgttgatatcagatttctagaggaatctgtaggttaaagatataaataaaagtgttgctaatgggctgagaacggtggttcacgcctgtaatcctagcacttcggtagaccattgcaggcagatcacttgaggccagaagttcgagaccagcctggccaaaatgaggaaaccccgtctctactaaaaatacaaaaattagcagggtatggtggcacacgcctgtaatcccagctactcggatggttgaggcacgagaatcgcttgaacccgggaggcataggctgcagtgagccaagatcacaccactgcaccccagcctgagtgacagagagaactatgtcttaaaaaaaagacaaaaaaaaaaaaaaaaggaagaagccgagcatcacaaattctgaaataagaagtctccaaacacgcgggcaatcagttgcacacagtacccccagaaatgtgcgtatggcctcttctaagatgggagaccctcctccgcatctggacctggagtcgccatttcctagcgcccctcgcagtggagcttgcccctttcttcggaaagtcggaagaaagccaccttaagcgctgcccatgtctgggaactacattacccagaatccgccctgcgaaatggtaacgtggctgagccaatgaagcttcagagaagccgtgccattgccggggcacgtaaagtcaagccaggacttccggcgtcctagccgtggcagccattttggcctgtcaggtccatccggcgatgctgggtctggacgagctcgggaggagtggttgtggccattgcacacaggcggatctgaggttcggcgacgccgctggtcgcgacccgggacaggacaacgacaggaacaccgccgagcccgcgttccccccccgcccagagtcatggcggcagcagccgctctgagggcgcctgctcaggtgagcgctgcgacctccgggccttacccaccctacccacccagaccctgaggcccctgatcgtgagggccgcctcctcgcgtccctgcagcccaggcctctgtcagggacggagaggcgccggcgggtgggatccctgtttccgacacccagttgatgcggtcggcagagcgagactggcggagggcaaaggcctgcaggcgcgactgaggcaggaggatgcggaacacggggacatcgtgtgtctactgggaaagaagtgtgatacggagttatttctttttttttttttttttgagacggagtctcactctgtcgcccaggctggagtgcagtggcgcgatctcggctcactgcaagctccacctccccggttcaagcgattctcctgcctcagcctcccgagtagctgggattacaggcatgcgccaccacggggtttcaccatgttggctaggctggcctcgaactcctgaccttaggtgatccgcccacctcggcctcccaaagtgctgggaatacaggcgtgagccaccgcgcctggccgaggcggagttgtttcttcagtaccaggctgagggttgaactttgactgtgaggacgctaaaagccatggacagttttgaacaaaggaggaaatctgtgttagagttgcgattcccaaaagatgttcgaaggaagaacagagttgaaggcagtgatgaggacattgagaggttgaatcattgagaggtgacattgagcactgggccacaagattagagactcagtctgaagtcatctggctgcagggccaaaaaaagcttacagagaagcctgagtctatcaaatccgagcacagacacatttgtgaaagccctgccttttggcacacctcatggctacagaagcacttacagaatccacagtaggaagtaggggatgctctagtccttcactggtcctcatcctatcccacatgtctagatcttggcatcttttttttttttcggcgacgggttctcactcaacacccaggctgggttgcggtgacgcgatcacggcgcagcacggcctcgacctctccgggctcaggagagcctctcatctcagtctcccgagtaactggctttttgtatttttagtagaggtggggtttcacggccgggcgcggtggctcacgcctgtaatcctagcactttgggaggccgaggcgggcggatcacgaggtcaggagtttgagaccatcctggctaacacggtgaaatcccccctctactaaaaatacaaaaaattagccaggcctggtggcacacacctgtagtcccaactacttgggaggctgaggcaggagaatcgcttgaacccgggaggcagaggttgcagtgagccgagatcgcgccactgcactccagcctgggcgacagagaaagactccgtctgaaaaaaaaaaaaaaaagagagagagagagatggggtttcgccatgttgcccaggctagtctcgaacccttgggctcaagcagtcctcttgcttcggcttcccaaagtgctgggatgccaagcaggaactaccgcacctcctaggacacttaagtgccatttctccggtccttcaatctggggatcttggaaaaacctcaaaccccaaacctacatcagtgacataggttatggggagttgttgctatgtctgtcaactaatgtaacacatgtggagggttcacccaggaactgatactggggtgtgcaaatacttacttagaagtgaaactagaggggtgaggtgatgttaccaatttcttaataggcgctgtctggttactgagtgggcaacagactgtggggttgagggaggaggaagatcaaactggaagctactgccctagtcgaggtgaggattaatggactagagttgtggcttaggcaatgtggctagatctggatttgtgttttttagaggggcaagtcaattttttttttcccaagatggagtctggacctgttgcccaggctggagtgcaatagtggaatcttggctcactgcaacctccgcctcctgagttcaagcgattctcctgcctcagcctccgaagtagctgggattacaggcgcgcgcctccacacccagctaatttttgtatttttagtagagactaggtttcgccatattatccaggctgcctcgaactcctgacctcgtgatccacccgccttggcctcccaaagtgctgggattacaggcttgagccaccgtgcccagcctggcaactcaatttttaaatgtgaacagtgagagcttgagaggattcaggaaacacccctgggttttttatcttagcagctgtagcaatgggagctgcatcaactgagatgagcaagttgatagcaggtgtaatattcactgaggctatcaggaggtttgttttggccattctgcgtggaaaaaaatacaaattgcttttgctctgctctcccccacaacaatcaacacagagtacttctgtgactagataatgtgtggatggttttcctcatacaccaagtagttctgcagtggacatcagatcccacagggtgaagtctcagtcccacgggactgtccgccaacccctttcgatgccaatcacaagccccaggatgtttttttttttttacctgtcctttgactgacttgataaaaatcaggttcccatgaccccttcctcggcttccattaaattgctagagccagtcacagaacctcaggagatgctttaatttgccagtttattttaaagagtatttattacaaaggttacagatgaagagatgcataaggggaagcgacccagagcttttatgatcttcaggcacaccaccatccaggaacttccatgtgtttggctatttggaagctccccagaccctgtctttatggggttttatggaggctttattacataggcatgattaattaaatcattggtcaatgctgatcagcttaacttttggccccctctcccctttctggagattggggtatggggctgaaatttccagacctcgaatcctgacatagtctcttttccctgaccggtctccattctgaagttatctaggggtttccaaccatcagtcaactcattgccattcaaagtcacttataaatttgagaatttcatgaattttaggagttgcatgccagaaaaggagatgaccaaatatatatttcacaatatcacacccatattaagattctgaaatgtattagatactacttagtggagctattaaatgggcagctggacacatagatgcaaatatctggggaagcgttgatattggaggtatctaatatatggtaactactgtgtggactgaaatgattgagtcatggctcacatttggaaggcacaaccttcagattatgttgatgacactgttggacaggaagtagagtttgggtttcctgcttgtgtacctggtgatggtattggatttgagaaacacaggtaagggaggtaaatggccatgaagggaggatacatctgtttcttcttcttctttttttttttttttttttgagacagagttttgctttgtcgcccagactagagtgccgtggtgcaatctcggctcactgcaacctccgcctcctgggttcaagtgattcttctgcctcagcctcccgagtagctgggattataggtgcctgccaccatgcctggctaatttttgtatttttagtacagacagggtttcaccatcttggctaggctggaaagggaggatacatctgacagactagtttggcaagtgacataatgcttccaagaaatgaatagacttgagatgcatgctgacgcataggagtagctgagggaagatgacactcaggctggagcttgtgtttattggccactttgtggcctcaccaagattttgagatgactttagtgtggcctggggtgtttgattcagcctggtggatgtggaggcaaatatggtcaccttgtgagagtcactatgcatgagattgatgaccagtggttctgggctttgaatggggttaggtggacagaagaaagtcatagttgccgggcatagtggctcacacctgtgatcccagcactgtgggaggccaaggtgggcagatcacgtgaggccgggggttcgagatcagcgtcgccaacatgatgaaagcccatctctactaaaaatacaaaaaaagtagctgacgtggtggcaggcacctgtaatcccagatattcgggggctgagacaggagaatcgcttgaacctgggaggcagaggttgcagtgaaccgagattgtgtcattgcactctagcctgggtgacaagagtgaaactccgtctcaaaaaaaaaaaaaaaaaaaaagtcagccgggcgcggtggctcacacctgtaatcccagcactttcggaggctgaggtgggcggatcacttgaggtcgggagttggagaccagcctgaccaacatggagaaaccccgtctctactaaaaaatataaaattagccaggcgtggtggctaatgcctctaatcccagctactcgggaggctgaggcaggagaatcacttgaacctgggaggtggaggttgcggtgagctgagatcgcgccattgcactccagcctgggcaacaagagtgaaactccatctcaaaaatataaataaataaataaataaataaataaataaataaataaataaaaagtcatagtttctgaggatagcaaatgcagcacagaagtggaatagaaccataaatatctgaaaatgctagtggttctttttgtctgtggatttatgcatggagggcgtcagaatgatttggggctaccattgctattgagaaacattggaattctgtggtaattttggattcctttttaatttaccaagactactgtggatgatgtcagccacattatggtgtaagccctaaagttaaggtcagtatcatgtgctaccttcatgtctggtgataccagtactacctcacatggtctgagtgcaaatctccctccccactctgctctttgggataatgtgtcctagcttaactacccttttaatcaagaggactagacagagttcctggttattatttatttgtagcaggtttcagtttctttttttcttttttttttttttgagacggagtctcgctctgtcgcccaggctggagtacagtggcagatctcatctcactgcaagctccgcctcctgggttcatgattctcccgcctcagcctcctgagtacctgggactacaggcacccgccaccacacccggctaatttttgtatttttagtagagacggggtttcacaatgttagccaggatggtctcgatctcctgacctcgtgatctgcccacctcggcctcccaaagtgcagggattataggcgtgggcgtgagccaccgcacccaatgcaggtttcaatttcatttctacccacagagttactcaagccagttgcagctgggtgtggtatcgcacacctgtggtcccagctactcaggaggctgagatgggaggattgctggaacccaggaagttcaggctgcagtgagctgtgattgtgccactatgctccagcaggagtgacagaacaagaccctgtctcaaaaattaaaaataaaaacaagccagttgcattcttttatgggaatcagggactatcacaccctcttgattgagcaaagcttacataccacaatccctggttgctcttttttttttttttttttttgagacagggtcttgctccgttgcccaggctagagtgcagtggtgccatctaggctcactgcaacctccatctcctgggttcaaatgattctcctgtctcaggctcctgagtagctgggactacaggtgcatgccaccatacccagccaatttttgtattttagtagagacggggtttcaccttgttggtcaggctggtctcgaactcctgacctcaggtgatccacccgcctcggcgtcccaaattactgggattacaggcgtgcgccaccgcgcccggccactctctcttatgcatagtgcaacccccatgtggctctctgtggtgagtggtgtcctcttctctcaagcgctgagcatatttgattaatgaactttcgtgatgacttgtgttcagcgtcaggtgttgtgtttggccatcatcataaccctagggtgaaactcctactctttaccagtagaagaaagggggattaaaatactgtaacttctggcaagaccagagagaggcctatagtgtgggcagttaggtggtggtggcaattggcatgtgtctgtggtgtccaaagatgggaaggatgtgtacgtacataaggattatgtttgaaaggcctcaggcactgcactgggattcatgtgacctttgctgtaccaggggaattgctagaaaggagaggatggaaccctttatttcaggaccacagcatagatacctgtgtgcttatctgcctcttgttgctgacggctatgtgtcatgattaatggtcccatgaggacacagtggcactagtgggcaaaatttctcctctgagttggggatcctgggaggaggaggatgggcaagggtagatatgttggggaagtggactgtgggtcttcagcataggggccatttgtggtttcatctatccccatcataacagagcagtgtgacctttgaagatgtggctgtaaacttttccctggaggaatggagtcttcttaatgaggctcagagatgcctgtaccgtgacgtgatgctggagaccttgacacttatatcctccctgggtaaggtactcatattcacctgtgacctgagttagtctgtgcccctcacctttatgccttatctctttctcacaccaggaccatggacacagcttcattctccagttctctggagaggttctgttgttggtcggactgaggtgtacgtactgccctgtcctttccttgagcagccccaacctgctttgttgcaggcttccagggaaggagtcagggtcaggagtcttaaagtcaccctaatgcctcccaccttggttgtcctctgcctgtctgggtgactgtgcagatccaaggcttctgtttgtctcaagttccgtttccctcctttagttcacatttgttcatgctacgaattgtcgtcactgatgtggtcattatgtacatgaaccacagcctattcttgcaataccctacttcaaaattctttttgtagtatttcatcaggcacaataacacctgtcatcccagctcttcagaggctactcggagcccaggagtttgaggccagcctggccaacatagcaggtcctcatctctaaaaatatataggaaggaattctttttgtaatatttagtttcttttcctgtggaatatcaaatgcagagttgttctgagccagcattggctgttcgtctgtcctatttttcccttagtacttacattatcgagtttccatgtagttgctcatcttggtggtgaaatgaagagcccgtggttgtccctaagatgtaaatgagtccagccttagcaaggacttggggcagcttggttctgaagaatagcatgtgagtaaggtcatgacatcagggctctattcaaattatgccatagacctcttctatttgactagtattttcatgccaatagaagtagccccactttatgtctttccttccccattcttgagagtgccagtttattagtcctacaccttgttgcttctgctgttacatccagcccaggactaattttcatatatctggactccacgtctcacctatttttctcacggctctgtctgcagtggtcttcaatattggctcatgtattttgtattacgaagtatatacccattcttttttttttttttttttttttttttgagatggagtttcgctcttgtttcccaggttggagtgcaatagtgcgatctcggctcactgcaacctccgcctcccaggttcaagtgattctctggcctcagcctcctgagtagctaggattacaggggcccaccaccacgcccggctaatttttggggtatttttagtaaagatagggttttaccatgctggcaaggctggtcttgaactgacctcaggtgatccacgcccctcaacttcccaaagtgctgggattacaggtgtgagccaccgcgcccagcctctatggagtatataatcttttttttttttttttcttgagacagtttgctctgttgcccacgctggagtgcagtggcacagtctaggctcactgcaacctccgcctcccaggttcaagcaagtctcctgcctcagcctcccgagtatctggtattacaggtgcatgccaccacacctggctaacttttatttttagtagagatggggttttgccatgttggttgttgaccaggctggtctcaaacccctgaccttgtgatccacccacctcggcctcgcaaagtgctgggattagaggcatgagccacggttctcggccacgtatatacctattcttaacagtccctgaccaaaggatgttgtgctctagtcatgttggggggggcctggacatatttatatagtactcacacgtcatcagcaaataaggttccacaggcaagttgtttgcaaatgaaggagttatagaccctgcctttattctgtctgttgactcatttagtcatgcccttgacaatatgaggccttctatatctgtgataatgctaagcagccccaacctcaacctgaacccaactccctgtttgtgcaaataattccatagactagttttttggtttgtcagatactcttgtgggtaggctgcatactcaacaaagtcaacatgtacctcaccagcatttctttgcttttaggttgttggcatggaggggaagatgaggcagcaccttctaagcagagcacgtgtatacatatatacaaagaccagggaggtcatagtggagaaaggccttatgagtgtggggaatataggaaattatttaagaacaagtcctgcctcactgaacccagaagagatcacaaacacaggaatgttcgcactggagaaaggccttatgagtgcagcaaatatgggaaattatttcaccaaaagcctacactccatattcatgagagatttcatactgggcaaaagacctatgagtgcagtgagtgtggaaaatcatttcaccaaagctcttcactcttgcagcgtcagacacttcacactagagaaaggccttatgagtgtattgaatgtgggaaagcctttgctgaaaagtccagtctcattaaccacaggaaagttcactctggagcaaagcgttatgaatgcaatgaatgtgggaagtcctttgcttatacatctagtctcattaaacacaggaggattcacactggagagaggccttatgagtgcagtgaatgtgggagatcctttgctgaaaactccagtcttattaaacacttgagagttcacacaggagaaaggccttatgaatgcgttgagtgtggaaaatcatttcgccgaagctcttcactcttgcagcatcagagagttcacactagagaaaggccttatgaatgtagtgaatgtgggaaatcctttagcttaaggtccaacctcattcaccatcagcgagttcatactggagaaaggcatgagtgcgggcagtgtgggaaatcctttagccgaaaatctagccttattatacatctgagagttcacactggagaaaggccttatgagtgcagtgactgtgggaaatcctttgctgaaaactccagccttattaaacacttgagagttcacactggagaaaggccatatgaatgcattgattgtggaaaatcatttcgccacagttcttcgttccgtcgccatcagagagttcatactggaatgaggccttataagtgaagcaaattttggaaattctcttgcccaggctttttgctccttcaaggccagagagttcacaccagatcaaggtgttatgagtgtgacaaatggggaatattctttagctagaatgctagcttctttacataaaagagtgctcccactgaagaagtgccttttgagtgcaatgaatgtgagaaagccttcagccctctctcattggttaccacaatatttacatgaggaaaataccacagatgtggaggtaatattattttttcttcaatataacactggaggaaaccccttatgaggatgccatctgcctaaattgaatgtcatacatcaaatagctgcatacattccaggtatgtgggaactgcatagtatttttcgacctgcccaggtctcttgctagacttctgtgacttacagttctcttctaaaaagcatttcacctttaccacttggcaggtgcccacagtacatcattcgcctaactcatcatgatccagaagtaactttgattttgtttcattcaacagagggattttttagtatcctcagcactcattctattctcatttctttctctccaatgagttaggccatgaacctgactcatttttggcacagaggactcttctgataacttgaaaaaatggactacctttttcagggatcttttggatctcacagagttcttaagatggaattttccagcctgccagtcatgaatctcagacagcctgccacctattgccctgatttgtgttataataaaggccttgttgcttaagacaccttcagtctttgcaggagggcatggaagctccaagtgcttttctcatactttaccctatgcatctctttatctgcatcttttgtactatttataattaaccagtaagttattttccctgagttttatgtgccattctatcaaattagtcaaatccagttgtggggtccacgggatttgtggtttatagctcatcagtcaaaagcagaggctctggggctttgattgtcatcagaaatgggagcctcagtcttggtgactgagtcctcaaactgggggatgtgatgctatctgcaggtagataatgactgagttgaactggaggacccccagcttgtgtccacgggaggattgcttggtgtgtgtggaaaacaccctgcacatctggtcacagaattattccatattgattgttgttgtgttgtgtgacagacaatagaggaaaagtttatttttttctacacatacgctatggcttcccttctattattccatatctttcaactcctgccatactatttctttctctccaagtttttgttcttcctcagagttcccataaatggaaaggatacgcacttcattgaaataagaatttcatgttagccaagttttcaggatagccatgagtttcacttaattatctgagaacttagagcttactgtcctctacttactatccactgagacttaatgtgttcttggccatcacagaaactttactagctacttatgccattgtcaatggataactctctgaatccacattaataactttgtaattagcttagtcctcagctgtttttcagagataatccccagtcttcatgcagacactatcactgcacctacaggtgaaatgataatcacttcctagcaaggaggttggatcatggaatacaagataatttctcaggaatcagatggtcttattccacacctgcaggaatgtcagcattgcaaccaccatggcaaatattgatttaataaacaattactattcccagataagtgtcaaaatcttagaagaaattgtcatatcttagacaatttagaagtgatggagggtggatgatgagaaattatcgcaccactgcactccagcctgggcgacagagcaagactctgtctcaaaaaaaaaaaaaaaaaaaaagctttactcacataaagtgaagaacaagaagacttttttgagtagatgtttagtgtccttataacattttttgtatatgcatttttatccttttgggaacatgatttacaaatgcgagctgcagggctattgcattaacgtgttgaatgcaagagttaaaacttcctgtcccatttagtgaatggaaaaatacttaagttacatgaataaaaattgtaaattacaaatagcaagatagttaaggatgtaaaacatgtcaatccctaaatgttacttaatgacatcatgttttataggtacattttattttcagttactagtattttattcccttgctggaaagatgtccagtgattctgaatcaatacaggtgtgtgggatgtcatctagaagtcataaaatggcttattcagattaaccatgttatgaccactcacactcgctgatacatatcttcctgtcacttccgtggagagtgaaattttctcttttattttttattctttgagacagagtttcactcttgttgcccaggctggggtgcaatggcgtgatctcagctcactgcaacctccacctcccaggttcaagtcattctcctgtctcagcctctagagtagctgggattacaggtgcccaccaccatgcccggataatttttgtatctttagtagagacggggttttgctatgttggccaggctggtctcaaactcctgacgtcagatgatccgcctgcctcagcctcctaaagtgctgggagtacaagcgtgcgccaccacgcccaaccaaaattttcttgataacaccctaattatattcccacaaaacctttgtagtcagagaaaatctgtagtttataaagacaaagtttttagtaatgagagcacttttaggatctgtaggctcttgtctgtataattaatacaacatttcttttttttttttttttttttttttttgagacaaagttttgctcttgttgcccaggctggagcgcagtggcacgatcttggctccctgcaacctccgcctcctgggttcaagcgattctcctgcctcggcctcccgagtagctgggattacagttgtccaccaccacacccagctaattttttgtatatttagtagagacgaggtttcaccatgttgaccaggctggtcttgaacttctgacctcaggtgatccacccgccccagcctcccaaagtgctgggattactggcgtgagccaccgtgcccggcctgttctgcttatatatgactaaaatttatgtgaaaatttctgtataaggccaggcttggtggctcacgcctgtaatcccagcactttgggaggccaaggtgggtggatcacctgaggtcaggagttcgagaacagcctgacccacatggagaaaccccatctgtactaaaaatacaaaattagctgggcttggtggcgcatgcctataatcccagctacttgggaaggctgaggcaggagaatcgcttgaacctgggaggtggagtttgcggtgagccgagatcacgctgttgcactccagcctgggcaacaagagcaaaattccgtctcaaaaaaagaaaaagaaaatttctgtacaaaatatttagatttccttcctattctcaatatattagtgtgctttatcattctaactttttggtattttgattatgctagtaatttcttagttttgttcaattttaatgtgatatataaatcaatatattccctgataaatttttacataatttatgtaaatttgttgttgttggccgggcatggtggttcacacctgtaatcccagcactttgggaggctgaggcagacagatcatctgaagtcaggagtttgagaccagcctggccaacatggcgaaccgtctctactaaaaataaaaaattagccgggtgtggtggcatgcacctgcagtcccagctactcgggaggctgaggcaggagaattgcttgaacctgggaggtggaggttgcagtgagccaagatggctccactgcactccagcctgggtgatagagtgaaactccgtctcaaaaaaataaataaataaataaatttgttgtagtatattttctccttgaattacttactctaaaacaagtaactttactaacctctacttggtctacctggttaattaattctttcttttttttttttcttttttttttttttgagacggagtctcactgtggcccaggctgaagtgcagtggcacaatctcagctcactgcaacctctgcctcccaggttcaggtgattctcctacttcagcctcccgagtagctgggattacaggtgcctgccaccacgcctggctaatttttctatttttcgtagagatgaggtttcaccattgttggccaggctggtcttgaactcctgacctcaggtgatccagccgcctcggcctcccaaagtactgggattacaggcgtgagctaccatgcccagcctaattaattatttttcaaatatctttaaactgatccaattcatgatcctaaaatgcacagtggcaaatgctgttagagtacattattctacatactgaatcttctgtttccatagttaagtttctggtttattaggagacatttttttttctttccagaattttaatgcaagttttactttttcaaattaataaaatgttagcaacagagaataacttgggaaaacaagtagcatttttatttcaatcattcttcatttgaatgcactaggaagctggagaattttagactcttaagaaatttactttaaagccaggcaccatggctctgtagtcccagcttctcagaaggctgaaacaggaggattacatgagctcgagtttgagtaaggcctgggcgacatagtctctttaaaaaaattcagttcatgcgggtgcggtggctcacgcctgtaatcccagcactttgggaggctgaggcaggcgggttgcctgagctcaggagttcgagaccaccctgggcaagacggtgaaaccctgtctctactaaaatacagaaaattagccggacgagccggcatgtgcctgtagacccagctactcaggaggctgaggcaggagacttgcttgaacccgggaggcggaggttgcagtgagccgagatgtgctactgcactccagcctgggcgacagagtgagactcatctcaaataaataagataataaaatccagttcagtaaaatgtgcctgataaaatataagtgactactggcctggagcagtggctcacgcctgtaatcctagcactttgagaggccaaggcaggtggatcacctgaggtccggagtttgagaccagccgagtcaacatggtgaaaccctgtctttactaaaaaatacaaaaattaactgggtgtggtggcacattcctgtaatcctggctacttgggaggctgaggcaggagaattgcttgaaccctccgggcggaggttgcagtgagctgagatcacaccactgcactccagcctgggcgacagggcaagacaccgtctcaacaaaacatatatataagtaatgaatgaatattatgtcaatattctaagtcagaatgttactgtaatactttttaattctcattccatttaaaataactggttaattttcaaatcataatgaaatttttacaaatttatgtgtagtacaaagcatgcatatacattcatatgtattatatgtatatatagcctttaaaaatatttatgagctttatgccgggcgcggtggctcacgcctgtaatcctagcactttgggaggcggaggcgggcggatcacgaggtcaggagatcaagatcatccgggctaacacagtgaaaccccgtctctactaaaaatacaaaaaaattagccgggcatggtgggcacctgtagtcccagctactcgggaggctgaggcaggagaatggcgtgaacccgggaggcgaagcttgcagtgagccgagatcgcgccactgcactccagcctgggctacagagccagactccgttctaaaaaaaaaaaaaaaaaaaaaaaaaaaaaaatatatatatatatatatatatatatatatatatatatacacacacacacacacacactagctttagcttccagtagatgcaatttatgtctttatgaccctatgtaatgaaatgtccattttgattcgtggctcttgatggcatctcaaatgatgtcttagatctgcgaagaagctcagcatcacaaattctgaaataagtctccaaacacacgggtaatcggttgcacacagtacccgcagaaatgcgcgtatggcctcttctaagatgggggagcctcctctgcaactggacctggagttgccatttcctaacgcccgtcgcggtggagcttagccccttcttccgaaagtcaggttggaggcggcctttaagcgccgcgcgtctctcggaacttaaatattacccggaatcgtctctgtgaattggaaagcccattgaagcctcagagaagccgcgccattgcggaggcacgtaacgtcaagcagggacttcctgcgtcctcgccgcggtggccattttggcttgtcgggaccatccacctatgctgcgtctgtacctctttgtcaggaccgagagcgcgcgagaggagtggttgtgcccattgcacacaggcggatctgaggcttggcgacgccgctggtcgcgacctgggacaggacgagcacaggaaccgcctggcctgcgtccccgcccgcgcatgaagtcgtggcggcggccgctcaagtgagccctgcgacctccaggcctcacccgccatccccacacagaccctgagacccctgactgtgaggggcgcttcctcgcgtccttgcagctcaggcctctgtcagggacctagaggcgccggcgggtggaatccctgtttccgacaccggttgatgcggtcgggagagcgagactggccgagggaccggcttaggcaaaggcctggaggcacgactgcgccaggaggattcggaacacagggacatcttgtgtccactgagaacaaagtatgagtcggagttatttcctcagtaccaggctgaggattgatctttgtgaggaccgtagaagccatggacagttttgaacaaaggaggaaatctgtgttagagttaaagattccgaaaagatgttcaaaggaagaacggagtgtaaggcggtgatgaggacagtgaggcattgagaggttgaatatttgctcaaggtcacgtagctggtaagaggtgacattgagcactgggccacaagattagagactcagcctgaggtcacctggctacagggccaaaaaaagcttacagagaaacctgagtctatcaaatcccagcagggacacattcctgaaagctccgccttttggcacaccttctcatggctatggaagtatttaaggaacccacagaaggaagtataggatgctctagtccctcactggtcctcatcctcacctatatgtctagatcttaatgtcctgggaatttatttatttagcgacagagtgtcactcttggtacccaggttggagtgcagtgacgcgatcatggctcagcatagtcttgacctccccaggctcaggtgatcctcccatctcagtctcccgagaaactggctaatgtttgtgtttttaatagagacggggttttgccatgttgcctaagatggtcgaaaactcctgggctcaagcaatcctcccgccttggcctcctaaagtgctgggattacaggcgtgagccgctggtctggccaggcctcctaggactcttaagtgcaatttctcctgtccttcgatctggggatcttgcaaaatcctcaaaccccaaacctaagtcactgacacaggctatggagaagtgttttcatgtctgtcgaccggtgggaaacacatgtggtggattaacccaggaatgatactgggatgtggaaatggcttagaagtgaaactggagaggccgggcgtggtggctctcgcctgtaatcccagcactttgggaggtcaaggcgggtggatcgcttgaggtcaggagatctagaccagtctggccaacatggtaaaacccagtctctactaaaaatacaaaaatcagctgggcatggtggcgggtgcctggaatctcagctactcgcaggctgaggtgtaagactcccttgaacctgggagatggaggctgcaatgagccaagattgtgccaatctgcactcgagcctgagcaacaaagtgagaatccatcgcgaaaaaaaaaagaaagtgaaactggagggggttaaatgatgttaccagtgttttaacaggttctgtctggttacagagtggacaacagactgtggggttgagggaggaggaagatcaaactggaagctactgccctagtccagatgctcaaatcctgacagtcttttccctgaccagtctccatcctgaagttatctaggggttaccaaccatcattcaactcattaccattcaaagtcacttataaatttgagagtttcatgaattttaggagttccatgccaggaaaggagatgaccaaatatatatttcacaataccacagccatgttaagattctgaaatgtaatagataatacttagtggagctatcaaatgggcacctaaacccatggatgcaaatatctggggaagggttaatattggagctatccaatatatggtagccactgtgtggagcaagatgagtgagtcatggatcacatttggaaggggcaaccttcagattatggtggtgacactactaggaagacaggaagtggaggttgggttgcctgcttgtgtacctggtgatggtattgtacttcagaaaacaggtgagggaggtaaatggccatgaagggagaatatatctggtagcctagtttggcaggtgacataggcttccaaggaatgaatagacatgagatgcaagcagaagcataggagtagctgagggaagatgacactcagcctggaccttgtgctaattcgccactctgtggccacaccacgatattgagatgacttttgtggggcctggggtgtttcattcagcctggtggatatggaggcaaataaggtcaccttgtgagagtcactaggcccgagattgacggccaatgggtctaggctttgaatggagttaggtggacagaagaaagtcataatttctgaagataacaaatgcagcacagaagtggaatagggccatgaatacctgaaaacactaacgttcttttttcctgtggatttatgcatggagggcttcgtataatgacttggtactaccactgctattaggaaccattggaattctgtgataattttggattgctttttaattcaccaagactactgtggatgatgtcagccacattatggtgtgagccctaaatttaaggtcaatatcatgtgctaccttcatatctggtgatactagtattacctcaaatggtctgagtacaaatcccccttcccactctgctcttttgtataatgtgtcctagcctaactacccttttaatcaagaggactaagcagagttcctgtttattatttatttgtagcaagtttgaatttcatttctacacacagagttaattcaaacaagccagttacagctgggtgtggtgtcgcacacctatggtcccagccactcgggaggctgaggtaggaggatccctgaaacctggaaagttcaggctgcagtgagctgtaattgcaccactacgctccagcaggagtgacagagcgagaccctgtctcaaaaattaaaaacaagccagttgcatcctttcaagggaatcaggggctatcacaccttcttgattcagaaaagcttacataccacagtccctggttgctctctcttatgcatagtgcaacccccatgtggctatctgtggtgagtggtgtcctcttctctcaagttgtgagcatatttgattaattaactttcttgatgacttatgttcagcatcaggtgttgtgtgtttggccatcactataaccctagggtaagactcctacccttatcagtagaagaaagggggaataaaatactttaacttctggcaaggccagagagaggtctatggtgtgggggagttaggtgttggtggcaattgacatgtgtctttggtgtccaaagatgggaaggatgtataggtacacagggattatgtttgaaggttcttaggcactgcattgggattcatgtgacctttgctataccaggggaattgctagaaaggaggggatggaaccccttatttcaggatcacagcatagatatctatttgtttatctgcctcttgttgctgatggctatgtgtcatgatcagtggtcccatgaggacacagtggcactagtgggcaaagtttctcctctgagttggggatcctgggagaaggaggatgggcaagggtagatatgttggggaagtggattgtgggtcttcagcacaggggccatttatggtttcatctatccccatcataacagagcagtgtgacctttgaagacgtggctgtaaacttttccctggaggaatggagtcttcttaatgaggctcagggatgcctgtaccatgatgtgatgctggagaccttgacacttatatcctccctgggtaaggtactcatacttaactgtgacctgagttagtctctgcccctcccctttattcctcttggtaataacgtctttctcacatcaggactgtggcacagcttcattctccaattctctggatcagttctgtggttggtagtactgagatacatgtactgccctctcctttccttgagcagccccagtctgctttgttgcaggctcccagggaaagagttagggtcaggagtcttaaagtcaccctaatgcatcccaccttggttgtcttctgcctttctgggtgactgtgcagatctaagacttctttttttgagacggagtctcgctctgtcgcccaggctggagtgcagtggcgcagtctcggctcactgcaagctctgcctcccgggttcatgccattctcctgcctcagcctcccgagtagctgggactacaggcgcccgccaccacgcccggctaattttttgtatttttagtagagacgggatttcaccgtgttcaccaggatggtctcgatctcctgacctcgtgatccgcccgcctcggcctcccaaagtgctgggattacaggcatgagccgccgcgccccgcccccattgcatttttcagcctgcctgtgtcccttgccagacttatgtgactgccagttatcttgcaaaaagcatttcacctttaccacttggcaggtactcacagtttcatcactcccctacctcattatgatccagacgtaactttttctttcattcaccagggggattttttagtatcctcagtactcattccattctcaattctttgtgtctgatgaggtaggccaaggacctgactaatttttggtgcagagaactcttctggtgatttgaaaagatggactacctttttcagggatctcttggatctcacaggattctttttttttttttttaagatggagtcccgctctgtcacccatactggagtgcagtggcgcaatctcggctcactgcaagctccacctcccgggttcacaccattctcctgcctcagcctcccaagtagctgggactacaggtgcccgccaccacgcccggctaattttttttttttttttttttttgtattttcagtagagatggggtttcactgtgttagccaggatggtctcgatctcctgacctcgtgatccacctgcctcagcctcccaaaatgctgggattataggcgtgagccaccgtgcccggccctcacagcattcttaagatagaattttccagcctgccagtcacaaatcagacagcctgcctgccgcctatttcccttgtttgtattataataaagactctgctgcttaagacaccttcaatcttgagagctgtatttacagtgtggaattgtttgaacactggatttgcagatgggcatggtggctcatgcctgtgataccagcactttgggaggccgaggcagaagggtcagttgaggtcaggagttccagaccagcctggccaacatgctgaaaccccatctctactaaaaatacaaaattagccaggcatcgtggcattcgcctataatcccagctacttgggaggctgaggcacaagaatcactttaacctgggaggtggaggctgcagtgagctcaggtaatgccaccccataccaggatgagcaacaagagcgaaactatctcaaaaataccataattttggggttcataggtcaacctgaaagggtggcagttttcatcacaatctctggtgcttctgagagcaacatgaaattgttctctacttcacaagggatggtgcattatgtttcagtgctgttgagggtaccttcacaggttgtgaggttatagtggaaatgataagtttttcggaattactgcattttaaaagggcttctactatgatccagacatggctgtgaaggatgaatacaaacagaaattctcaggaccttcttaattgaatcttatgtggctaaggtcactgctggagagaataacctaaagattttgttatttgtggtagtccttctagtctaattgacctaaaggtcattcctgcataggcaggaggaagaagaaagggagcagggatgtccattagaccactacgtggcccatcatgtgaccagccgtcattctttctgaatcatctggaaatggtctttattgttcgtcatgtttttgttaccatgaaggctagttgcctcactcaggttgaggagatgatacagcaatagttaataaacctcttggaaaaatcaagtccagatttttaaaattacatttttaaagctgtaataagaaataaatcacttttttttttctttgagatggagtctcgctcttgttgcccaggctggaattcagtggcacgatcttgggtcactgcaacctctgcctcccaggttcaagcgattcccctgccttagcctcccgagtagctgggattacaggcacctgccaccatgcccagctattttttgtatttttagtagaggtgaggtttcaccatgttggccaggctgttctcaaactcctggcctcaggtgatccgcccacctcggcctcccaaagtcctgggattacaggcattagccaccatgcctggccaaaataaatgactttcaaaaaaactgcacatatttatttttatttatatttatttatttatttgagacagagtctggctctgtcgcccaggctggagtgcagtagcacaatctcagctcactgcaagctccgcctcctgggttcatgccattctcctgcctcagcctcctgagtagctgggactataggcgcccacagccacgcccggctaatttttctatttttagtagagacagggtttcaccgtgttagccaggatggtctcgatctcctggccatgtgatccgcctgcctcggcctcccaaagtgctgggattacaggcatgagcccccgtgcctggccaaaactgcacatatttaaactgtaaagtgtgataagttttgacattaataagcctgtaatatgatccatcaccttcatatttacctggagtctggtaacgtctttacctctgccttccagatgaccattgataactttgctttataatagattattttacattttctacatttttatacgtgatttgatgtcgtgaagtgtttaatctttatccctggatggtatcgtgcggtatatttattttgagatttgtcagtgatgatacttgagtagttcactcctttttatattgctgagatgacatgctatgaaatatcactgtatattcattcatctgtttatacatcattaatctatttctcatttttggcttccataaataaaactacagacactttagtacagttctttatgtaaatatgtttcttttttatgtgttactatctgggggttcaataactgaatcagaataggtaaatctatagctttttgtttgtttgtctgttttgagatggagtctcgctctgtcactcaggctggagtgcagtgatgcaatctcggctcactgcaacctctgcctcgtgggttcaagcaattttcctggctcaccctccgaagtagctgggactacaggcacatgccaccatgcccagctaatttttttgtatttttagtagaggtgaggtttcaccatcttggccacgctggtcttgaactcctgacctcgtgatctacctacctcagcctcccaaagtgctgggattataggcatgagccactgcatccagcaaatgtatagctttttaggcaacaccaaagtgtactgtaaaattaatatggttgttccctttagtgttactgtcaccagtgtccatgaattccactttcatgtttttatcgatacagaatatggatagtctttttttttttttgagacaaagcctctctctgtcgcccaggatagagtgcagtggcgtgatctcggctcactgcaacctccgcctcctgagtttgagcaattcttctgtctcagcctccctagtagctgggactacagatgcatgccaccacgcccggctaatttttttgtatttttattagagacagggtttcaccatgttagccaggaggatcttgatctcgtgatccacctacctcagcctcccaaagtgctaggattacaggcgtgggccaccacacccggccaattttttgtatttttaatagaaatggggtttcaccctgttagctaggatggtctcaatctcttgacattgtgatctgcccgcctcaacctcccaatgttctgggattacaggtgtgagccaccgtgcccagcagagaatatggatagtcttttaaatttttacccttttttataagtggatgttccttctttagtaaaatgtctatttatatattttgcttgctttttaaattcttatttatttttagagaaaagatcttgctctgtcacccagccaagagggcagtagtttgatcatagctcactgcaacctcaacctcctgggctcaagcgtcctcccaccccagcctcctgagtaactgggactacaggcacatgccagcacacccaccgaatttttaaatttttttgtagagacaggatctcattatgttgctcaggctggccttaaactcctaggctcaagcaatcctctcacctcaccctctcaaagcactatgtctggcaactcattttcttcttctcaaatgtattttgcctatttccgttttcattaagaaataaaatatggttgggccagtggctcacgcctataatcctagcactttgggaggtcgaggtgggtagatcacctgagatcaggagttcaagaccagcctgaccaacatggtgaaaccccatctctactaaaaatacaaaaattagccaggcatggtggcgggctaatcccagctactcgggaggctgaggcaggagaatcacctgaacctgggagacagaatttgcagtgagctgagatggcacaactgtactccagcctcagcaacaagagcaaaactccgtctcaaaaaaaaaaaacaaaaaaaaaccaggggtcacatcattgacccttctctctctctccctcacctacaacatgcaaagatctacttgttcctttattaaaaatataggtagaatgtctccttttctcccatctgcacggcattcacctggtccatcaactcatctgaattatgctggtaaacttccctccgtgctaactgcctcctcattaatccaggagtctgttctcctccagtgtgcaaccagatagatcctatgaacatctggattagaccacctctttccccatccaagcatcccagcatctccaaaacagatgcccagcttttcaggcaaccacattacaggcctgaatcttgacccggcttcttgttcctatgagaaagaatagatgcctgtcgtacataggtcccagctcagtcacacctcaaagcatttgcacaaaatggtatgaattcctaaaatagctttctacacctgtttccattggttgccagaaataagaacacttctattaatccttggctggtactcaggactctgagcttggtgtatccacaggttctccacgccaagaactgggaaaacatcaagtgaacactcaagacaccataatctcagacaccacacaggtagtgtcaggttcagggagagactgggacactttctctttccctgtgttggcaccataagcattttcagtgttcagaacccatgaaaataaggcaactgtgaccagctccagctgatcaaacctccattgatccctacacaaccgtaaagccaggggccctggggctaactaattaactgatttcaatcctcagtgctccttcttaccacctatggcctagaaagaagactccacttctcagtgcctcattgtcctcatcatccttattccagtctgttctctgagaggcttttgtaaacttttaaagttctaccaaggacatgaccctcttctgttcacaaatctccatacatcccaggacactcagattgaaggcacaacccctaagacaaccaatacaggtgtgactctggctcatcttcagtttttactagggcctttttttttttttgagagacggggtctcactatgttgcccaagcctgtcttaaacttctggacttatgtgatcatgacacaacatggttaccaggttctgaaatgttcatggctcagatgcacctccaagcctttgcacctattggttcctctacctgtattactctacctggggtgaagcctgtaatacacagcatttacctgagctaggtccctcagtgtggctgctgccatcaactgtgggtggagtaggcatcaccccagccagtgcctatgagcctcagacctgccacttgggagcagagatgactactcctcttgtgccttctcagtcccaacccagtactccctggcctgacaagcatgcccagaaatccctcatcctgggccttgcaactagcaccttctgggtaaagtacttctcagagctctcagccaacaatggtggtatcctccaagagcaaaccgaatgcagaccatgttacactctgagggctgctggaaagccctgctcacacctcaagggaggaagactattgattctttgtaaaagcgtcaaataggtatcacataagactctaggaagctcatcctgcacccagagaataaaaaaactatttgagatgctcccaaactttacttatctaagtggccatatcattggcatcattcagacttacaatgtgtgcactcagagctgagaacattaagtattgattgctctttaaattcatgttacccaaattattacagtcagttttgtgagtttcattgttttgttgggaacgaaagaaaattgtccataagacataatgacaggatgggtacaaaaaacagttagaaaaaatgaataagaccgagtatttgctaccataacagggtggctgtagtcaaaataatttaatcatacatatgaaaatcactaaaagggtataattggattgtttataatacaaaggataaatgcttgaggtgatggagacaccattaaccctgatgtgattattacatatggcatgactacatcaaaatatctcatgtaatctacaaatatatacactattatatacccacaaaaaataaaaataaaggctgggtgccatggctcacacctgtaatcccaccacttcaggaggcctgaggtcgggagtttgagaccaacctggccaacatggagaaaccacgtctctactgaaaatacaaaatcagctgggcatggtggtacatgcctataatcccagctactcgggaggctgaggcaggacaatcgcctgaaccctggaggtggaggctacggtgagccgagatcgtgccattgcactccagcctgggcaacaagagcgagactgtctcaaaaaataataataaaataaaaaaataaaataaattgctggacacagtggctcacacctgtaatcccagcactttgggaggctgggggcaggcgcatcacgaggtcaggagttcgagaccagcctgaccaatatggtgaaaccccgtctctactaaaaatacaaaaattagccgggcatagtggtaggtgcttgtagtcccggctactcaggaggctgaggccggagaattgcttgaacccgggaggtggaggttgcaatgagctgaggtcacgccactgcactccagtctgagcaacagagctagactccttctcaaaaaaataaaataaattaaaaaaaaataataaagatgtaatgacagggaaatagacagatgttgatacaccctgaagcaggtagtgaagctggcagttggccactggttcccacagaaaattgctctagtgatgctagcaaatcccaaaattggggctcaatccaggaggattcctggcttcataaaggaaataattcaagagcaagccaagagtgtaaagtgaaggcaaagcaagtttatgagagcaagagaacaggaaaatggctgctccacagacagagcagggctactccacaggcaaagtagcacccgtggattgttggctagctatatttatagctactccttaattatgtgctaaataagaggtcggttattcatgaactttctagaaaaaggttggagagttcccagaaccaggggttccttctcttttaaactacatgaggtagcttctgggcattgccatagcatttgtaaacggccatggtgctggtgggagtgtcttttagcatgctaatacattataatgagcatataatgagcaatgagggcaactagaattgatgttcattgccatctcagtttcactgctttcagctggtttctttagtgcatcctgttttgaccagatcctgtttcatcatgagcagggtcatgaccactgctcagaaacaagtcctgctgacctatgtcactgtttgaaatgcttattcttcagtgccataaagaaatagcacttgaggccaggcatggtggctcacgcctgtaatcccgcactttgggaggccgaggccggcggatcacgaggtcaggtgatcaagaccattctgactaacatggtgaaacgccgtctctactaaaaatacaaaaaattagctgggcgtggtggcggtcacctgtagtcccagctactggggaggctgaggcaggagaatggcatgaacccgggaggcagagcttgcagtgagccgagatcgtgccaatgtactccagcctgggcgacagagcaagactccgtctcaaaaaaaagaaagaaatagcacttgaacatagatgtatttcataaggccatttttacttcctgcagaaagggtgcactcgccagcagttttgcaacaggagcacactgaacaaagaagacagggtcatttataacctgaggcgttcaccctcctgccggtttccattgcctggaacaggacctcatattctgtatgtgtcctgattggctagcaacttagaaccttttaagaggcaaaggtagaggagaacaaagaaaggaggaagtaacttgtggaatgctgagaaaggtaaaaacacttttaaataaggaagaggaacaggctatgacctaatgcttgcttggagcagtataagcatgtcagggcaaatatttaggctaaattgtcagagctaagaacataaagtacattgatttctttattatggctagcagatatttaagaatgctagcacaagtctttcaataaatttcgcttttaagagaagttactatttattcctaattagatggggaggaaagtctttgaagaggaaactgtactttacttttaacaatattccccctctttttatttcataattcctcttcaaacttatttaatgttttgacttaattgctttttttgtccttctaagagaagtaatttttttttaatagggaggaggagagttagcagttaactctgtaacagtggcagagacaagtttttgtataaaactttgaaggtagggaatattataacagcctacaagaataagtacactaataacaagagtgaacaaggtgagaattgaagttaaaatttctttttattcactgaactaatgttttattattttagaaaaggggttatttattttacaattcttggcaaatttatcggatagggctgttaaccttggtagcgcttttgttatagttctatcaggggcagtattattaggaacaaaggtacaatactgagttttgtataaaacatttaatttattggtctttgtggggaattagacgcattaccactctgttacaactgaggcattaattttgtagcttcaccaacattaattggtttgctttcatgacactgctgaggaatcaattctttctgcagaggttctgagttttaattatgacacaaacatctcctttttctgctaattatttaaagctattttatttttctacgccatctggctagtagatcctaattgcttagctatctgtttgatggtatcctcagtgtaatttatgaattgttggtgattgtaacatagcttagtctacatttttttatagttaccagaatgatgtggatttaaattctgcagctatttgattttgtgctttaaacttatcgggcacttctcacaggaccttaatagcatttatgtaaacctgaggattaaaggactcatacgtttttcttggcctgtggtgttttgtttttacctttgtagattgatgaaatgccaggatgaaggggatacccaattggattacagcacaagtactgctccaattatttggcagagtgtccagtaaaggtcttccacttaccactatacatttgtttggggatggctaagcatggactgatgggcaaagtcttggaaaggcttgagctctttccatcatcgtttaatgcttccaaggaacactaaattttcctcctgacctgagacgcacaaagtaaactttgtgcattcagcattcagcattcagaggtggaagccggattgccatagggggctgacctgcagggtgttaaatttcaggaaatagcagagagagctcagtatgttggattatcccaagcaatgggattttgaaaaagagccaccatacagtccttatctgagtggaaaggggataatctgggattctggcctactgtgcgtacaagtgtaataatcgcttttatttgaagtgctaatggattatttaatccatttcagccaggcatttgcatcttgatattttgtcttgacagcgaaggtctgtctgtcttagatctcttatttttacaagacaccttagttttaccagatgtaggagcaactggtgtgggatctagatctgaggcagcttaagaagggaaagatgagggaataatgtgtatttttaaaataactggggggtcttttttatttatgttaattttttttttttttttgagacggagtctagctccgtcacccaggctacagtgcagtggcgcgatgtcagctcactgcaacctccgcctcccgggttcaagcaattctcctgcttccgcctcccaagtagctaggattacaggcacccacctccgcgcccggctaatttttgtatttttagtagagatggggtttcaccatcttgcccaggctggtctcaaactcctgacctcaggtgatccaccagcctcggcctcccaaagtgctgggattacagtcatgagccaccacgcccagcctacttatgttaatttttataccatagaagcgactaagggcgtgtctagagttccttaaggtggaggtggtgataaagagaaagacagggttatattgacaaggctgacagtaagaaggggtagtccttttagtgaaatagatgaggggttttaggtctgcacaaacctttttgtggaagtctaactttgctattgggtagtttgagtgatgcagtcctatttactacaatgttgccaggcagtaggagcagaaaattggtgtcttggctgcaggtcattacaacaatgagtgctaggaataactgtgtcaattaaagggctgggatataaatatttgtgtgaaaaggctagctgctgttgatcttttacatttctacaaggtatgacaaagcaagcattaaaggcaatagtctgagtgagtcagacttagttacattaataacaaaggagctaataacagaataagaaaaggaagcagtatagaaggtatatgaaaattaatctttctttaacttagtagggcttgatcctagtacagtaacccatgattctgagaggaagatgttttcttgacttgagtgtggtgggtccatttttttttttcctcagctgtgtggacggcagtctcaggggttaacagcgtaaaatagggttcttcccaggctggtttgagttttttctttctagcttttgatgaggacgtggttttcaggctggtgctggtgtactggaaattctaggggtggtacctgtgctaaaagacttttaggtccgagggaagtgaaagtggaagataaattaagtataggatttttgctgcatattctggggccttaggcgtcatggtgtcacctcctgctccattcttgttcagcgccacccaggggaggctgcagccctgccccttcttaatgtcttggccttcttgtggccttcaccacccttgctcactgtggccttcaggatgaggggccttgtgacttacctggccatcttagggccttaagaaagctaaataccattgtatatttgtcaatttttttgtatgattttatatcaaataagttaaattttatctttagtggccaggcgcggtggctcacgtctgtaatcccagcactttgggaggctgaggtgggtggatctcctgatgtcaggagttcgagacaagcctggccaacatggtgaaaccccgcctctactaaaactaaaaagtaaataaataaataaatttatctttatattaatatgctactaatattaaacttaattttagtaagatcttatagacattatctaattttaatgtctgactataaggcaagacttttacagactgtttttataatttttgttaaagagcacgttggtgctttaagaaaaatctatcgtgctttaattttaacgtccagttcacagaaaaactggatgacacccttttaactttagccaatatgtttacacacagaatttgataccctcttaactttagccagtatgtttacacacagaatttccttgacaattaacattttaaaacttgcttaaacctttaaaacaaaaaaattgtcttaacctttagtgtaggtaaaaatccatattcttatgcctccttgtaatcttattaaaagtatattttatttttcttacataccttgtaaactgtttaataataattttatatccaggaggcctaattacttttaaattatacagtatttattgcatacattcccttttatagcttttcttacgactttcacaatcttcaacatgtcttaactttctgccttccttttacactatttttttcctagtttcacctcctttgtcttcttttgatttctgtctcttccagtttctctcttactctttccttctatttctttctctcatttgcactctattttccgctctctcatcccgtttccctttcttctccggacttctcccgctcctgccgcaagcagggctgggccaccgcacaggccccgcccccgaccccgcgctgctgtttttcttttttttccccctgatttcccctcttacttttttttttttccttttctttttacacttagtttcttgggctgagtgggatttgcgtggctgcagtctgggccccgggcagtcactagcctagaggcttggcagatatgcctgccgcaaattgcaagaattacgccttttcacctcctctgctctcctcccggagccggtgcccaccctctttttcacaaaccgcagggctggggagagggacttaacctttggcctgcctgcctggctgtttggctctgcgcttgctgtttttggtttctttctcttctactggtctttcctttgtctttgccagccacctatgctgctgttttctcctctgcttccctctcccctaggggagggaccggcaggagtggagctactgtttctttccctgagaagaaagaaaaggggagttctgaatatttttcttactactggaggtttgtgtgaggttcaacccccccaacaatagggatttctcacctctaagacatcctaaggaatactttaccacccctgcggtttttctctctttggtatgtcctaaccaaggaatgctttaccatcccggctttttccttagtcccgaccaccaaggaaatactttaccggctcctgcggcttctccttccttggtctgtgcacagttgtcattccattacatgaggatctttaagctaggttgctggccagttttttttttttttgcccccattgctgagagcccaggtttattcgtcacaccgggtgggtctcaatttcttacctatgaggaccttgcaatgaagtaggggagcgctaccccatgagagaggactggagaccgcccctagagaagaatgtatccccgtacggattgccaccaaattgtttgaaatgcttgttctccggtgccataaagaaatagcacttgaacataaatttatttagtaaggccatttttacttcctgcagaaagggtacactcagccagcagttttggcacgagagtacacaactaaggagatagggtcatttataacctgacgcgtccaccctactgctatgtccggtttccactggctgggatggggcctcacattctgtatttgtcccgattggcgagcaacttagaattttttttttttttttgatggagtctcactctgtcgcccaggctggagtgcagtggcaggttctcagcttactgcaagctccacctcccgggttcacgccattcttctgcttcagcctcccaagtagctgggactacaggctcccgccactatgcctggctaattttttgtatttttcctagagacggggtttcatgtgttagccacatggtcttgatatcctgacctcgttacccgcccgctttggcctcccaaagtgctgggattacaggcgtgagccaccaccccccaccaccgcccagccaatttagaaccttttaaaagaagcaaaggtagatgagaacaaaggaaggaggaagtaacttgtggaatgctgagaaaggtgaaaacacttttaaataaggaagaggaacaggctatgacctaatgcttgcttggaccagtataagcatgccaaggcaaatatttaggctaaattgtgggagctaagaacataaagtacgttgatttctttatgacggctagcagatatttaagaatgttagcacaggtctttgaataaattttgcttataagagaagttaccatttattcctaattagggaggaaagtctttgaaaaggaacctctactttactttttagttactatgaggatcactatatcaatgtttcttaattcatatgctaaagtgcactcaatttttttttttttttgagacggagtctcgctctgtcgcccaggctggagtgcagtggtgcgatcgccaattgccgctcaatgcaagctctgcctcctgggttcacgccattctcctgcctcagcctctggagtagctgaaactacaggcacccaccaccacgcctggctaattttttgtattttccctatagaaggcgtttcaccatgttagtcaggatgatctcgatctcccgacgtcgtgatccacctgcctcggcctcccaaagtgctgggtttacaggcgtgagccaccacgccctgccctcaatttcttttttcacattgacatctatctcaaaggaagagcaacttaaccaatgcctttgtggtacacatcagtggctacaactttcacaattacagcacagataaaaaaggcatctgaataacagcataaacatggcatctgagctccaaaatttcatctccttacaagaaagtggttattttccagtgactgcaggaatagtttcacactgggtactggcattatctcagaataaatgtttttgttttattttttttgagacagcgtctaactgtcgcctaggctggagtgcagtggtgtgatctcagctcactgtaacctctgttgcctgggttcaagtgattctcctgcctcagcctcctgagtagctgggattacaggcatgtgccaccacgcctggctaatttttgtatttttagtagagatggcgtttcactatgttggccaggctggtctcaaactcctgacctcaagtgatccacccaccttggcctcccaaagtgctgggattacaggcgtgagccaccacgcctggcctcagaatcaattacaggcgcagtggctcacgactcaggcctgtaatcccagcactttgggagtccaaggcaggcagatcatttgaggccaggagtctgagatgaacctggtaacacggcaaaaccccatctcttctaaaaatcaaaaaacagccagcatggtggctcatgcatgtaatcccagctatgtgggaggctcaggtgggagaatcgcttgaacctgggaggtagaggttgcaatgagccaaaatcacgccactgcactccaacctggtcgacagtctttaaaaaaaaaaaaaaagcagccgcacgcgatggctcatgcctgtaatgctagcactatgggaggccgagatgggcggatcacaaggtcaggagatcgagacgatcctggctaacacagtgaaaccctgtctctactaaaaatacaaaaaattagccaggcgtgtttgcgggcgcctgtagtccacaggactggctgaggcaggacaatggcgtgaacccggaaggcagagcttgcagtgacctgagattgccccactgcactccagcctgggggacagagtgagactccacctcaaaaaaaaaaacacaaaaaaacacaagcagcaactcaaatatccataaacggatgaatgaatatataatgacatttcatggcagactatacttctcagcaatatacaacaaattaactcatgtctacattgatatcaaaataagcatgatgcaggagagcacccagggattataagaggaaacactttattacatcagtcagaaaattctagaaaatggaaagtattatacagcagagtaaatcaatggttgtctgcatagagaaaaactttataaaggctccaggtgaatacaaaggtgatagattagataaattcattattgtgactctgatgatggtttcatgggattataagaaaattcaagccaggagcagtggctcacgcctgcaatcccaacactttgagaggccaaggcgggcagatcacgaggtcaggagattgagaacttcctggctaacagggtgaaaccccatctctactaaaaatacaaaaaaggtaggagtggtggtggttgcctgtagtcccagctattagggaggctgaggcaggagaatggcatgaacccaggaggcagggcttgcagtgagccgagattatgccactgtactccagcctgggtgacagagcgaggctgtctcaaaaaaaagaaaaagaaaattcaagacttatcctacagctcaaatatgcatactttattggatgtcatttatatattttatttttgaaacagggtctcactctgtggtccagactggactgcagtgttgcaatctcggctcactgcaacctctgcctcccaggctcaagcaaatcctcccatgtagcaatcctcccacatgacagctctcctgtgagttatgcagccagacttctggataaatatcctgtatttgtcacactagtaaggccttcattcagtgttaactataatcctgaaggaatacagaggtgtggctacaaaactgcccaaatttattttacttgtaaggactcttctctagtgtgaactctccaatatccaaggagagcagacctttgggtaaacattttccacatttgctgcaatcacaggatcttactcaggtgtgtattctccaatatttaatgagactggactcactgcactcataagccctttcttttgtgaactctctgatgatgacgaagtgaagagatttgcctaaattttttttcacattcactgcacccgtaaggcttttctccagtgtgaactctcctgtgtttagtgagactggagctttcggcaaaagatttcccacattcactgcactcataaggcttctgaccagtgtgaactctcttatgaacacggaatgtagagctgtgggtaaatgacttcccacaatcactgcattcatatggcctttctccagtgtgaactctctggtgtgcaatgaggtggtacttgtgcctaaaaaatttctgacaaacctcacactcatatggcttctctccagtgtgaattctctggtgtacaaggaggtgggacttactgttaaataatttcccacatatcccacacgtataaggtttttctctagtgtgaactccttgatgattactgaagctgtcatatttgctagaggatttcccacattcacaccacacagaaggttcttctgtagggagcagtctctcgtgctgactgagtatatctttggtgctaaaatgtttcatgcatcctccacagctgtaatggctttttcccccatgaaacagagacacacactcagttttgctgtttgacttcccagtgtgagtggcctcttgctggagtaatcctgacctgagcaaaaagtctttcccactctcactgaagacagatgactcccctgacacatgcaacttacacctcttcgcaaacaacgcctcctcaacactccctctgtagggtttctctccaatgtgctcattctggtgctgatgaaagtttccactgtcatacaatttattcccccaggcctcacacctgtgcagtttctgcttgtgatgtgttccctgatgatctgccacatgcaaaatgtctcccaagatcgggccacacatctcacaggggtgggccttcttgggagacacacctgccataggagtcctgacctgagtctctctttgtatataaatactctgcttagaaggtgccgcctcatcttccactccacaccaacaacctgaaagcaagaaaatgctggtgaagtgcatgttaactctggtgggaaggcacagaccacccacaagtgtatctgaaaaactgaggaattactccaaggaagtacttggaggaacaggatgttggcttcaggtggaagatggtgctatgtattattactggactataatggtcacagaatgtaggaggcctcataacataaaggacacaaccatgtatgtaacacagggagtagaggcagggtctacaatccctgcatctgcaaaccactcatctgcagaatttatgtcctcatgacatgcgagtgctgtagagagggatttgtccaggccaaggaaaacacaagcacaacacagcagcttctgcttgaggacagtttaacaaagtgtacacatttgctaacacaaaacctgtatgctaatactggaaaccactgcagatgaagatgtgaataaaattaagatgtgaggtccagagatgtgaagattattcaggggaataaatatcagactacaagctcatgtacaaatcagttaaaggatttaaaaaaaaaaaaagtacaactgacaaggagtacaactgacaattctgaggttcttaacaatggggaagaggccagtaccagtggctcacagctgtaaacccaatgtaggaagatcacctgagcccagaaatccaagaccagcctgggaaacatggtgagaccctgtctctacagaaattatttttaaaatggccaagcatggtgactcatgcctacaatcccagcactttgggaggctaaggcaaagggatcactcaggcccaggagatcaagaccagcctgagcaacacagcaaaacctctctacaaacattagccaggtgtgatggtgtgcacctgcagtcctagctactcaggagactgaggctggaggatcacttgagcccaggaggttgaggctgtgtgaactatattcacaccactgcactccaggtaacaaaaatgacagtgtgagaacctgtctcaaaaaagaaaagagaagaggagaggagaggggagggaaagggagaagagggaagaggaaagagaagagagaagaaaagggccaggtgtcgtgggtcatgcctgtaatcccagcactttgggaggcagagctgggcggatcacctgacgtcaggagtttgagaccagcctgaccaacatggagaaacactgtctctactaaaaatacaaaatattagcctttggggaaaagaaagagagatcagactgttactgtgtcgatgtagaaagaagcagacataagagactccattttgttcagtactaagaaaaattattctgccttgagatgctgttaatctgtaaccctactcccaaccctgtgctccagaaacatgtgctgtgtcaactcaaggttaaatggattttgggctatgcaggacgtgctttgttaaacaagtgcttcaaggcagcatgcttgttaaaagtcatcactactccctactctcaaggacccagggacacaaaacactgcctaggaaagccaggtattgcccaaggtttctccccatgtgatagcctgagatatggcctcatgggaagggaaagacctgacagcccgacgccagtaaaggggctgtgctgaggattagtaaaagaggaaggcctctttgcagttgagataagaggagggcatctgtctcccgctcatccctgggcaatggaatgtctgggtgttaaaacccaattgtatattccatatactgagataggagaaaaccgccttagggctggaggtgagacatgctggaggcaatactgctctttaaggcattgagatgtttatgtatatgcacatcaaaagcacagcacttttttctttaccttgtttatgatgcagagacatttgttcacatgttttcctgctgaacctctccccactattaccctattgacctgccacatggtagagataatgatcagtaaatactgaaggaactcggagactggtggcggcagggggaaggcagggttcctccgtatgctgagcgccagtcccctgggcccacttttcttttttttttttattttttattctttattgagacggagtctcgctctgttgctcaggctggagtgcggtggcacaatcgcggctcactgcaagctccgcctgccgggttcacgccattctcctgcctcagcctctccgagtagctgggactacaggcgcccgccaccacgcctggctaatttttttgtatttttagtagagacagggtttcaccgtggtctcaatctcctgacctcgtgatccgcctgcctcggcctcccaaagttctgggattacaagcatgagccaccgcacccagcccacttttctttctctatattttggatctgtgtctctttcttttctcaagtctctcattccacctgacgagaaacacccacaggtgtggagaggcaggccacccttcattagccgggcatggtggcacatgcctgtaatcccagctactcaggaggctgagggcagaattgcttgggcctgggagacagaggttgcggtgagccagatcgcaccattgcgctccagcctggacaacaagagcgaaactccatctcaaaaaaaaaaaaaaaaaaaaaaacaatggagaaggccaggtgcagtggatcatgcctgtaatcccagcactgtgggaggcaaaggcaggcggatcatgaagtcaggagtttgagaccagcctggccaatatggtgaaaccccatctctactaaaaatacaaaacatagccaggcgtggtggtgcacgcctgtagtcccagctacttgggaggctgaggcagaagaattgcttgaacctgggaggtggaggttgcagtgagccaagatcgcaccactacactccagcctgggcaacaaagtgagactctgtctcaaaaaaaaaaaaaaaaaaaaaaattagctgggcataatggcatgcacctgtattcccagcttctcaggaggctgaagcaggagaagtgcttcagcccaggaggcagaggttgcagtgagcagagatcaagctactgcactccagcctgggcaacagaacaagaccctttctcaaaaaacaaacaaacaaaaccaaaaacaagaatgaaggagaaaagacgatacagaaatcatgtgtgcttacttgtctggccccaaaaatactactgaaatagaagaggtttctgtcatgatttgaataaaactcttgacatcatgcaccactgtcctaggatgctatttttcagggactcagaacccataatgctgaggccagattcatttgcatcttctgaccacagaagatgatcccaccaccaagataaccaagtacatgagacatacatgatgtaagaacaaagggaaagacagaacaaggaaacagccaacactggcttagaacaactcagcacatgacagcagacaggaaacaatattacaaaaagaatttctgttttttgagacggagtcttgctctgttgctcaggctggagcgcagtggcacaatctcagctcactgcaacccctgcctcctgggttcaagctatcctcccaccttagcctcccaagtagccaggattaaaagcgtgtgccaccacacctggctaatttttatattttcagtagagatggggtttcaccatgtcggccaggctgttctcgaactcctggcctcaagtaatccacctaccttggcctccctgagtgcagaaattataggcatgagccactgcaccagacctatgaagagaatttctaaggacggtattacaagaacagtctatagtctatgtaggcagtgacaatgtcaatgaagacaattcctggcacagggaggcatgaagaaataacaggtagaggaatgaattagatcccgaacctgaaatctggatgaaatcacacaaacatccacaggacaaacaaggtagcctgcattaagttgcctgtaagacttctgactctgaattcttccctgggagctcaatagcaggtgttggggctgctccaagaatggagagggcagtatgcatacctcagtcctaccaaccaagaactgaagtaggaagctgtgtccatgctcctgacatgagaaagtcttgccaatagaaaaagagggggaaagacagagactagctcaggtcacaggggtgagtgtgggcaacttacccagggaggacataagtgccaggttctccagcgtcacatcacggtacaggcatctctgagcctcactaaggagattccattcctcctgggtaaatttcacagccacgtcttcaaaagtcactgtgccctgttatgatgttgacagatgaaaccacaaaccacccctatgctgaggtatcacaatccatctctcccacacatctactctcgcacatcctcctctcaaggtcctcaaacataggagaaactaggcccactggtcatggggtacagccaccaacaacaatagttagttgaacaaataggtatctgtgcggtggctgtgatataagagtccaccccctcctgacaggcacttcccctagtatggccgaggtcatggaaagcccaatgtggcaccttcagcacagcagagataccctctctgaacgcacctcattcttttttttttttttttttttttttttttgatacggagtctcgctctgtcacccagggtggagtgcaatggcgcgatctcggctcacgcaacctccgcctcccgggttcaagcgagtctgctgcctcagtttcccaagtagctgggattacaggcatgcgccaccacgcctggctaattttgtatttttagtagagacagggtttctccatggttggtcaggctggtctctacctccggaccaacccgcctaggcctcccaaagtgctgggattacaggagtgagccactgcacccggccccaccctccactttcttgtatgcgttccttaaatgcttctacagccataaaggcctgagggaagaggctgactttacaggactgtgtccctgataggatctggtaagctcaggcctccctgaacgcttttgtgtccacggagccaggtgaccttggactattgtctaacctgcgtgtctcagcacaaagtgtcatctctaccacctatatgatctacaaggattcaatctcaaagggccccaacgtcatcccctctctactctgttatttatttggcctttaggaaactttaaaagcctggactttgatccagtcccttctttcttggaaattctcctatttctagtgtcctcgcaatgatttcacagcccccagcctccttgcttttccaggaggagttccgcctcacaggttgttccctacaggcgcctgtggaccccaggttccatcctcccggatccgtccatctccaggccattgcccgcgcccctccctgtacctgtcgctctccccaccgcatcccacgggtgtctgaaacagggatccctcccgagagcgcctcagtgtcccgacgccgggtccgggttgcagagccgtaaacaggtgccgctccctcgctgctttaggacttgtgtgactaggaggtgaccggagagcacggaaggcgccacaattacctgaacggggaaccttagcgcggccgccgccatgggaccacgtggggtaagctgggttgagagcagcgggcgccgttaaagagctgcagagtcacgtctgtgcaaagagaagaacgactctcgacctcctggatccagtcaccaccacggtcccaacacagcgctccaaggactccctaacgccaatggaaatggtcgctactaaagggcgccgggagtcccgcctctaccttacttgcgcacacggaaacgccttcaatgtgaactctcactggctctgccgtgctgtcatttgacgcagagctttctgggtaatgtagtttcccaggttccaaggccgtaaagagagagattcccaggggcgcttcggaaggaaaagcccagctccacctccggggccctcagggaagcctcctgacccgcacggtggcgcgcgcctgtaatcccaaattttgagaggctgaggtgtcaggactgcttgagcccaggtggtccaggctgcactgagctatgactgcaccactgcactccagcctgggcgacagaacctgtctcaaaagaaaaagaaatgttaattaagcgtttgtgctgttaagggaggagaccacctctcatattgttttatgcccaatttctgcctccaaagaaacaagtaaaaactaaaaggcagaaatgaaatccacaggcagacagccaggtgccaaccctgggcctggttaaagatcgacccctgaccaaaccggttatgttatctatggattccagacattgtatggaaaagcattgtgaaaatccctgtcctgttctgttccgttctgattaccactgcatgcagcccccagtcgtgtaccccctgcttgctcaatcgatcacaaacctctcatgtggacccccttagagttgtaagcccttaaaagggacaggaattcctcacttggggagcttggtagttggagatgtgagtcttgccaaagctccaggctgaatacagccctgcggcttgtcctgctacatttcttggttccctgactgggaagccaggtgattaacagatagtcgaggcagccccttaggcagcttaggcctgccctgtggagcatccctacaggggactctggccagcttgagggacgcagaacctgagagcactcccgggtaggcaattgccccagtggaacacctcgccagagtggcgtgtggcaggcccccacagaggatcaatgcagcggctgaacactgggaaggaacaggcacttggagtccggacatctgaaacttggtaagactagtctttggaacttgcccactccatttgagtggaagggtggcctgatcacccacggcatgcctgtaccggcactttggtttttgtttttgacttgatttggattgcttgatactttcgttttggttttgacctggcttggatttctggatactctgatttggattttgattctggtttggtgtaaacggtaaaagtgtatgtgtgccctttttacctgttctttgttttgtggtgtgcgtgtggtgtgagcgtggtgttttgtctcaaagaagcatgggtcaggcacaaagtaagcccacttcactaggaactatgttgaaacatttcaagaaaggatttaagggagattacagtgttactatgacaccaggaaaacttagaactttgtgtgaaatagactggccagcattagaggtgggttggtcatcagaaggaagcctggacaggtcccttgtttgaaaggtattgtgtccagaattggttccttccggtgggttcttggtctcgctgacttcaagaatgaagccgcagaccctcacgggcagtgttaaagttcttaaagatggtatgtctggagtttgttccttcaggtgttcagatgtgtctagagtttcttccttctggtgggttcgtggtctcgctggcttcaggagtgaagtggcagaccttcgcggtgagtgttacagctcataaaggcagtgcgggcccaaagagtgagcaacagcaagatttattgcgaagagcgaaagaacaaagtttccacagtgtggaaggggacctgggcgggttgctgctactggctggccagcttttattcccttatttgaccccacccacatcctgctgattggtccattttatacagcgacagagtgagactccacctcaaaaaaaaaaaaaaaaaaaaaaagaagaatctcattttgaagccaaaaccatcagagtgaccattccaattatgtgctgagcataattccatctcttagacatcagtgctaacatttctctgaggccctaagttttttcaccatctactgatgtttcctcagaactacttctgtcagaactgttgaataattacctagtcagtgttttttgtttttttttttcacacagagtctcgctctgtcgcccaggctacagtgcaacggctcaatcttggctcactgtaacctctgcctcctgggttcaagtgattcttctgcctcagcctcctgagtagttgggatgacaggtgcgtgccgccacgcccaactaattttgtacttttagtagagacgaggtgtcaccatattggccagggtggtctcaaactcctcacctggtgatccacccgcctcggcctcccaaaatgctgagattacaggcatgagccaccatgcctggcctatctagtcagtattaataggctttcgtatcttgcattttacaactgtttctctcatgtaattttaatttttcatgcagaacactccctgctctcttaagataaatcaatgataatcacttcccatcaatgacatgaactcatggatttaacaaatgcccagtatgaccagatggagagcactacctttaaggactgtagctattaccactatcaagctaccaaatcctttattgttgtttatatatataaaactgacttcaaattcctaaaaggagttgaatataagttagaatatcaagtaaaggatactaagtgggtaaaagtgtggtgcaattaattgaatgctacaattgatttgtgaaccccccaaatgtgagacaggtctcagttcatttgaaaaatttattttgccggccaggcgtagtggctgactcctgtaatcccagcattttgggaggccgaggcaggcggatcacgaggtcaagagattgagaccatcctggccaacaaggtgaaaccactaaaaatataataattagctgggcaaggtgctgcgcgcttgtaggcccagttactcgggaggctaaggcaggaaaatcgattgaacctgggagacggaggttgcagtgagccaagatctcgccactgcacttcagcctggcgactgagggagactcaatctaaaaaaaaaaaaaagtttattttgccaaaggtgaggatgcatgcccgtgacacagcttcaggaagtcctgacggcacgtgcccaaggtggttggggcacagattgtatgttttgttttgttttgtttgagacggagtcttgctctgtcgaccatgctggagtggagtagcgcgatctctgctcactgaaagctccgacttctgggctcatgccattctcctgcctcagcctctctagtagctgggactacaggcgcccaccaccaggatggctaatttttttttgtatttttaccagagacggggtttcaccctgttagccaggacggtctggatctcctgacctcatgatctgcccacctccgcctgccaaagtgctgggattacaggcctgagccaccgcgccggctggtttaatacattttaggggggcatgagacatcagtgaatatttgtaagaattacatcggttctgaccagaaaggcggggacaactccaagcagggaggggacttccaggtcacatgtaggtgagagacaaatagttggattctttttagtttctgataagtgtttccaaaggaggcaatcagactatgcacctatctcagtgaggagagcaatgactgaatagaatgggaggcaagtttgccctgagcagttcccagattgacttttccctttagcttagtaattttgaggccacaagattttcctttcacagattctatcagcaggagagttgttttctgtaggaatcacagagattcagctttgcactcctgctgtaggggagcacatccctaacttccttcatttgccttaggcactctaaggcttctgagggccttcagacacattataacacaacaacgcttatcagcttctgcttccagtgcaggtattttgcgactgaacgactgtttcaaacggtgtggtaatttggatttttagcctttgggagaatcctaaataatagtttcagcttgagctccctattatttaccttgagctccccgaaatctgaagtagtatttttccaaattcttgagtgattagttacagacactagtctccaggaatctcaatacggcttctaaggctaggtgagacccctcctctgccctagaaaggcgccttttttttttttttttttttttttttgagacagagtcttgctctgtcgcgcaggctggagggcagtggcgcgatcccagctcactgcaaggaggttcacgccattctcctccagcctcagcctccagagtagctgtgactataggcgcccgccaccacgcccagctaactttttttttttgaatttttagtagacacggggtttcaccgtgttagccaggatggtctcgatctcctgacctcgcgatccgcccgcctcagcctccaaaagtgctgggattactggcgtgagccaccgcgcccggcctcagggcgcgcttttaaggagagttcctgacatgacggtgggcttttcctgcagatgcacctctgggtagcgccctctttacagccttgaaacctggtcaactacattactcagaaagctctgcgttgaatgaatgccgtcagagccaatgagggctcggaaagaagcatttccgtgtgtgcgcctaatgtagggccgagacttccggggtcctcttgtagcggccacgttgatctgcgatacgcgtgtttgcccagtgagtggccccggactgctacgtgggactgcggtgaatgaacccagaaggtggagaggaaccgttctcggtgcacagaggcggctctgcagcccggtgagggcgcctgctgctcccgggcagtgctttccccaagtagtccgatggctgcggctgcgccgaggcgccctactcaggtaattgtggcgttttctgtgccctcaggtcacctcatcgtcacccaggtcctaaaccagcgagggagaggctcctgctcacgggtctgtagccggtacccggcgtagggacactgaggcgctggcaggaggggtccctgtgtaaacgtccagtggattcaccttgccagctgcctagagagagccgatttgtgaagacaggggaattgtaaggagaaatagtaattcacgcagagccggctgttcgggagacaggagttttattattattcaaatcagtctccccgagcatttctggatcagagttttcaaagttaatttggcgggtaggggcttgggaagtggggagtgctgaacggtcaggttggagatggatttatagagggttgaagtgagtttttcatgctgttttctgttgtgggtgggatggcagaactgattgacccagattaccggtctgtgtgttgtcagctgatccatccagtgtaggatctccaaaatacctcaagcactgatcttagcttttacaattgttatgttatcttcaggagcaacttggcgaggttcagactcttggagccagaagctacatgacccctaaacggtaatttctaatcttatagctaaactgttagtcctgcaaaggcaggctggtccccaggcaagaagggagtcttttcaggaaagggctgttatcaattttgtttcagagtgaaaccatgaactgaattccttccctaagttaattcagcctgtgcccaggaatgaacaaggacagcttaaaggttaaaagcaagatggagtcggttaggtctgatttctttcactgtcataatttcctcagttataattttgcaaagacggtttcacctgtgtttgacatcagtgcgatgcggtggggagagcaacaggcacagggaggggcctaggcgatggtctggagatggaggcagctgggaggatggaacctggggtccacaggcacctgtcgggaacaaagtttgaggcagagctactcctggaagagcacacaggctgagggctgtgcattcatcatgaggacactagaagccatggagagttttgaagaaaggagggacatgatccaaatccaggcttttaagatttcccaaaggccaatcaaaggaagaacattgtagagagagaggatgaggactttggggccttgggaggttgaatcctttttgtagctcacataggtggtagagatgacattttgcactgagacaagcaggtcagacaaccagcctgagtgccacctggctccagggacaagaaagggttcagggaggcctgagcttatcaaatcccgtgacatgtttgtaatgtctgcctctcccctcaggcactcctggctgcagaagcacttagggaacccacacaggaaagtggagggtgttcaatcccctcattggtcctgacgccatctacaggttctctagcttgtggtgtcctgggactcttaagtgccatttttttcagtcctttgatccgaggaccctggagaatctctgaagccaggataccaagtccatgacaggttatatggaggtattcccatttctgtcaaccaatgtaaacacccttgtaagattaacccaggatttgctaccaggttgtgaaatgcttagagataaaacggatcaaagtcaggaggtgatattaccacagttctacctggctacaggcttcatctggttggaccttgttgcatagactgtgggttgagggaagaggaagaaaggtcagagataaggctcctgccataatctaggtgaggcttaatggatcagatatgtggtaaatcacatgggtctggattcaggattcactttttgtaaaaagacagctaggttttctttctttctttctttctttttttttgagacgcagtttcggtcttgtcacccaggctggagtgcaatggcatgatctctgctcactggaacctccgcctcccgggttcaagtgattctcttgcctcagccttccgagcagttgggattccaggcatgaaccaccacacttggctaatttttgtatttttagtagagacgaggtttcaccatgtcggccaggctggtctcgaactcctgacctcaggtgattcacctgcctcggcctcccaaagtgctgggattacaggcatgagacaccgtacctggcagacagctaggttttctctctctctcttttttttttttttttgagacggagtttgcttttgttgcccaggctggagtgcaatggcgtgatctcagctcaccgcaacttccgtcacccaggttcaagtgattctcctgcctcagcctccccagtagctgggattacaggcatgcaccaccaccctggctaattttgtatttttagtagagatggggtttctccatgttggttaggctggtcttgaactcccgacctcaggtgatccgcacgcctcagcctcccaaagtgctgggattacaggtgtgagccaccgtgcccggccgacagctaggttttctaatgtgggtgataagagcatgaaagaggaattgggcatgagcccaaggtttttgatctttgcagctgtaaccatggacgctgcatctgctgacatgaagttggtattgacaacaatattcactgtggatagcaagagggttgttttggccatatgaagaatcagagaccaataagtggtggcatcaaatggataactagacatacaggatgggatatctgggagggtgttgataatggagacatccaatatatgaaagctaatgagcgaactacagtaagttagttatgggtccatttaggaggacatgcttcagattttggtggtaaatcttttcaggggccaggaaggtgtgactacaggctgaggagtggatctcttacttacgtccctgagtgatgttattgggcttcctaaacacctgagagggtgtgagtgaccatcatggcaggatgtatcagacagtagagtttggaaggggacatagacatccgaggagagaatagacgagatagatgcatgcagaagcataggagtaattcagggaagatgacacttaggcctgagttggtgccaaagttgtaactatttatcactgtctggactcacaaacgttttgagatgactttgggagtgcctggggagtttcattcagcctggtgcatatgggcagtgaaaaatatgctcatctgtgatagtagatgtggtttggttcacaaatccaggggctgggctttaaacggcattaggtggacagaggagggttgctacagctgaggtctcagctggtgcagcacagaagtggaatagggccatggatatctaaagccatatgtggttctgtgtggctatggagtcattccgggagacattcacaggatgatttgggattaccactgctattgtaaaccatggaaattctgtgttaatattggatgctatttgtatttgtcaagcatagtctggatgtttatccacattttggtataaggccagaattgaaggcccaatatgatgtgtcactttgacatcttgtgatagtgggacaaccttaaaaggtgtgagcacaaatctcatctcattcccactctgctctcttgaataatgtatcctagcctaacaaccctttttatcaaggcaatgaggcagggttcctctgggggaaagaaagagagatcagactgttactgtgtctatgtagaaaaaggaagacataagaaactccattttgacctgtactaagaaaaattattctgccttgagatgctgttaatctgtaaccctagccccaaccctgtgctcacagaaatgtgctgtattgactcaaggtttaatggagttagggctgtgcaggatgtgcctttgtaaacatgtgtttgcaggcagtatgcttggtaaaagtcatcgccattctccagtctcgggtacccagggacacaatgcactgcggaaggccgcagggacctctgcctgagaaagcctgggtattgtccaaggtctcccccaactgagacagcctgagatgtggcctcatgggaaaggaaagatcttactgttcccccagcctgacacctgtaaagggtctgtgctgaggaggattagtgaaagaggaaggcctctttgcagttgagataagggaaggcacctgtctcctgctcatccctgggcaacagaatgtctcagtgtaaaacccaattgtatattccatctactgagataggagaaaaccgccttagggctggaggtgagacatgctggaggcaatactgctctttaatgcattgagatgtttatgtatctgcacatcaaaagcacagcacttttttctttaccttgtttatgatgcagagacatttgttcacaggttttcctgctgaccctcttgcctctattaccctgttgtcctgccacatccccctctccgagatggtagagataatgatcaataaataccgagggaactcagagaccagtgccatcagggttcctccgtatactgagccccggtcccctgggcccacttttctttctctatactttgtctctgtctcttatttcttttctcagcctctcatcccacctgatgagaaatgcccacaggtgtggaggggcaggccaccccttcactctctcagttatttttattacaccagtaatttcctcattgtgttgaatcttacagtggcttataaatcgatatgtacctagaaatgtttagccagttcatgtatatttgatgtatcacattttttcctttgaatcacatactctaaaagaagtaacttcctcttactaacctctgcttttcctaagtgatgaattaatcctctttagataattacaattctcttttcaacacttagcaagaactaatctataaagaagcactataaatctataaagaactttcccacccgggcacagtggctttggttcaacgcttctccaccttttggctaagatcaagtgtgagatggagtttcgctctcattgccccatctggagtgcaatggtgaagtctcagctcactgcaacctccgcctcccgggttccagtgattatcctgcctcagcctccggagtagctgggattacaggtgcctgccaccacacctggctactttttaatatttttagtagagacagggtttcaccgtgttggtcaggctggtcttgaactcctgacctcaggtgatccacctgcctaggcctcccaaagtgctgggattacaggcatgagccagtgtgtccggcccccagcatcattttcttcagagaatattcgaggaatctttttatggcttggcttcctttttttttttttttttttttaatttgagatggagtttcgctcctgttgcccaggctggagtgcaatcaatggcacgatctcggcccaccacaacctctgcctcccagttcaagcaattctgcctcagcctcccgagtagctgggattacaggcatgcacaatcatgcccggctaattttgtatttttagtagagaccaggtttctccatgttgatcaggctagtcacgaacgcccaacctcaggtgatccacccaccttggcttcccaaagtgctgagattacaggcgtgagccaccgtgcccggcaatggctgggctttcattgggtgtgaagtctacaaacagcatcttcaatttaaactgtcagttaaagttcttaagatttaggaaatgatggagcttggaaagttatgagattacaaaattccggaaagtccattagaaaaaccacaggatggaaaaaaaaataagccaggcaacaaagcttcagaggtccctgctggcccagggagagatacctgcagtgtccagcatctcagtgaacatgatctactttcaaaggcaggggcttaaagcgagggaagggggggaactggtggaagcaaaggctctccccatcaccaccttggttttaggtagggattttaatttaactgaaggacatctctcaacttggacaataattaatccctcaacagcacctcatatctgctatgactttgcagcgcagcagaaagaatgtttagtatctaatagataaaaatttcatcgaaaaaattaaaatattcttgcaacacccccccaacaccaattcctattctaaagtgaatctatcacttgtgctgttgatacttgaccatgtacttaattggaaacctagatgcaaaagactgaaactgaatcttcaccccaaaatgaaaacaaaataaaatgagtaacttgaggtttatggcatatagtttaggtaaacacacacacaaggagaagggggaagaggaaatggaaggtgtcggaagcaaagctgagtgacagaacacattcagtcagggcagatgtctatacagagtgtagtggaacctcaggaaaagcttcatatggattcatgcgcacgcgtctggaggcaccagatccctccatggcagatccaagaacagggagctgagggagaaggccattcccttcattccagttttaggagctccacatcgaagacgagagtggcgtgtggtgggatgatgcctgggtgcccagtggcaccgtaggcagaatctggagatatagtcagttgggctgtctgacccacactcatctaagcaaccctttcttcccagcctcggatcacctcctgctaaaaattaaggggcttgtttctgtcccgggaggaatcaaatttctttccatcttcaagcatcccggtgtagtgcaccacgcaggtctggccgtgcctcgggaaggtgcactcctctcctggggagatggtttccacctgcactcccatggcggcggccgatgctgggtgggcgggtagcgcgacgggcggtgtggaccaacagcgacctggcggcggttccacagctctggctagacccttggcttttatttatttatttatttatttattttttgatacagagcctctctttgtcacccaggctggagtgcagtggcacgatcttggctcacagcaacctctgcctcccggattcaagcgattctcctgcctcagcctccccagtagctgggattcatgcccagctaatttttgtatttttagtagagacggggtttcaccatgttggccaggatagtctgtagctcttaacctcgtgatcccctcacctctgcccagagtgctggggttacaggcgtgagccactgggcccggactttttttttttttttggccaggcgcggtggctcacacctgtaatcccagcactttgggagggcgaggcgggcggatcacgaggtcaggagatcgagaccatcctgactaacatggtgaaaccctgtctctactaaaaatacaaaaaattagccgggcgtggtggcgggcacctgtagtcccagctactcgggagggtgaggcaggagaatggcgtgaacccaggaggtggagcttgcagtgagccgagatcatgccactgcactccagcctgggcgacagagcaagactcaaatcaaaaaaaagaaaaatcgacccctgacctaatcagtaatgttatacagattacaaacattatatagaaaagcattgtgaaaatccctgtcctgttctgttccgttctaattaccagtgcatgcagcccccagtcatgtaccccctgcttgctcaatcgatcacgaccctctcacacagacccccttagagttgtgagcccgtaaaaggtacgagaattgctcacctggggagctcagttgttggagatgtgagtcttgccgaagctcccagctgaataaagcccttccttctttaactcggtgtctgaggggtttagtctgcagcttgtcctgctatacctacgatttcatctccaacccaaccaatcaggactgcccacttcatggccccctatctaccaaattatccttaaaaaaccccagtctcatgaggtggaggttgcagtgaaccgagatcatgaccttgcactccagcctgggcaacaggagcaaaactccatctcaaaaaaacaaacaaacaaataaacaacaacaaaaaaacccagtctccaagttttcaggaagactgatttgagtaatattaataagactccagtctgctgttcatccaactctgtgtgaatcaaactctttcttttacaattctcctgtcctgataaattggctctatctgggcagtgggcaaaatgaacccgctgggtgtttacacattcattttaacaatacaataatggttattaacctttgcattaatctctgcttccagtggaagaattttgcatcaaaggaccacttgaaatgataggtgaatttagatctatagcctttgggagcacctacactaactctgaaataatatttttccatacactagggtaatcagctacagctaataattgcaagaaatctcaataggagttttaaggaaaggcaggatgatcctctgcccagtagaaagatctgcaatcttttatttatttatttatttaattttatttttttccaatacagagtcttgctctgtcgcccaggctagagtgcagtggcacaatctcagctcaccgcaacctctgactcctgggttcaggagattctcctgcctcagcctcctgagtagctgggattatatgcatatgccatcatgccaagctaatttttgtatttttagtagaggcggggtttcaccatgttggccagactggacttgaactcctgacctcaggtgatccacccgcctcagcctcccaaagtgctgggattacaggcgtgagccacccacacccagcccttatttttattttttagagaagaggtcttgctctgttgcccaggctggagtgcagtggcacgatctcggcttaccgcagcttcaaactcctgagctcaagcgattctccctccttcaggctccctaaccctaaccccaaccttggggcagctgggaccactggcctgcctgacctcaccccactaatattttttattttttgcagagacaggatatggggaaaagaaatcagattgttactgtgtctatgtagaaaaggaagccataagaaactccattttgatctgtattaagaaaaattgttctgctttgagatgctgttaatctgtaactttagccccaaccctgtgctcacagaaacgtactgtattgaatcaaggtttaatggatttagggctgtgcagcatgtgccttgttaacaatatgtttgcaggcagtatgcttggtaaaagtcatcgccattctccattctctattaaccagggacacaatgcactgcggaaagctgcagggacctctgcctgagaaagcctgggtattgtccaaggtttcccccactgagacagcctgagatatggcctcatgggaaaggaaagaccttacatcccccagccggacacccttaaagggtctgtgctgaggaggaggagtgaaagagggaggcctctttgcagttgagataagagtaaggcttctgtctcctgctcattcctgggaatggaatgtcatggtgtaaagccaaccattcccattcgttgtattctgaaataggagaaaactaccctgtggctagaagcgagatatgctggcagcaatactgctctgttgctctttgctacactgagatgtttgtttaaagtgaaacataaatctggcctatgtgcacatccacgcacagtacctttcattgaacttattcatgatacagattcctttgctcacgtgtttccctgctgaccttctccccaccatcaccctgttgccctgccacactcccctcaccaagagagtaaaaataatgatcaataaatactgagggaactcagagaccggcgccggtgaaggtcctcacatgctgaatgtgccagtcccctgggcccactattctttctctatactttttctctgtgtctaatttcttttctcagtctctcgtctccacctgatgagagatacccataggtatggaggggcaggcccccttcaaacaggattttgctttgttgctcaggctaatctctaactcttggcctcaaatgatccttctgacttggcctcccaaactggtggaattacaggagctagccaccataccagtcagggcgcatatcttaaggatactcctgaggtggagctgggcttttcctgcagaaccgcctctgggaattgtgccctttaccctccttgttacctagggaactacattacccagaaaactccgcatggaatgacagagtggaagagccatgggggctcagaataaaggcatttcctgtgtgcacgtgacaatgggtccggacttccggcgccctctggtggcggccattttgattggtgttgggtttatttgtcggagaggctcctgagcgctaggtcggcactgcggtgactgaacccagaaggcggagaacagttgtcctctgctgcacagaggcgactctggagctctgtgacggcgccaagcgtgacccacccctgggccaggatagggaccgtcatgcccatatctcctggctggtcaccctctcctcccaaccctgctttaaaccacgtggttcgatggcggtggtggccacgctgaggctctctgctcaggtaattgtggtgccttccatgccctcaggtcacctcatcatcacccaaaagcctgtagtcttgcaaggaagagtctttaaggtggcagagccataggcagcagatgctgagtttttattaggagtgactgtcaggacagcccttttgagctgctgaaggcctaatcttttatagtcactgtacctgagcgagttagagaaaacgccacactttgagacgaattaagagtccgtttatttaaaaaaaaatccgtttatttagccggcggccaagagatgggtaacgctcaaagttctcgcggccccaaagaaggggctagattttcttttatactttggtttagaaaggggagggggggtctagttaaaacaattttacagaagtaaagtaggcaagaaaagttaaaaggataaatggttacaggaaagtaaacagttccaggtgcaggggctttaagactattagaaggtgatagatggggggctttgggcgttatcaatcagacgaattcctgggaactgcggatatagctcgccacagtatcttatcagttaattgcattcttggatgtgctgggagtcagcttgcacaagttaagtccttgaggaaggggctgccagtgaaagagccaagatggagtctgtctggctctcttatgtaagggagagtcaattcaggtggaaacaagtctaggtgattaaaggaaagggagaatctaaaaacagggttagtaaaaacaaggttgggcattacatcacagaatcctctagtgagaactgatagtggaacagtgtgctcgttggtgaccttacctcgttagatgcagtctttattttttatttttttgagacggagtttcactcttgttgcccaggctggatgcaatggcgtgatctcggctcaccgcaatctccgcctcctgggttcaagcgattctcctgcctcagcctcccgagtaggtgtcattacaggcatgcgccactgcacctggctaattttttgtatgtttagtagagatggagtttctccatgtaggtcaggctggtctcgaacacctgatctcaggtgattcacctgcctcggcctcccaaagtgctggggttacaggcgcgagccaccgagcccagcttattttatttatttattttttttttttttgagacagagtctcagtctgtcacccagcctggagtacagtggcgtgatctcggctcactgcaacctccgcctgccgggttcaagcgattctcctgcttcagcctcccaagtagctgggattacagacacccgccaccatgcccggctaattttttgtatttttagtagagacggggtttcgccatgttgcctagcctggtttcgaactcccgagctcaggcaatacgctcgcctcggcctccgaaagtgctgggattacagacgtgagccaccgtgcctggctgtctttatttttttatttgtttactaaacaaaacatcttaccctttatagcagagtgccctgtgaaatacaaattgtctttttctttttgtttttttttgagacagagtctcgctctatcgcccagactggagcgcagtggcacgatctcggctcactgcaagctccacctcccgggttcatgccattctcctgcctcagcctcccgagtagctgggactacaggcatgcactactatgcccggcttatttttgcatttgtagtagagacggggttccgccatgttggccagaatggtctcaatctcttgacattgtgatccgcccgccttggcctcccaaagtgttgggattacaggcgtgagccactgtgcccggccaattctatttaattattttaatttctttgctgaatttatctgatagaattctgaattttttctccgtgtttgtcttgaatttctttgaatttcctcaaaatagctatcttgaattatctgtctgaaaggtcacgtatctctgtttctccaggattcgtctttggtgctttatttagtttgtttggtgaggtcacgttttcctggatggtgttgatgcttgtagatattcgtcagtgtctgggcattaaacagttaggtgtttattgtggtcttcacagtctgggctcatttgtacctgtccttcttaggaagagtttccaggtatttgaaaggacccgggtgttgtgatctaagctgaatctactttagcgggaaccccacactcagtaatgctgtgactcttgcagactcagagagctgtaccacctttgtggtcttgaataagatctgaaagatttcccttgattaacataacaggtagagactcttgttgggtcttccctcactttgtcccagcatgtctctgtcagtgctgaagtgcctgaaactgggggttgggacagaagcacccctttagctaccaccactgggactgtgctgggtgagagctgaagccagcacagcactgggtttcacccaaggctcctgtgaccactacatggctatcgcctgtgttccctcaaggccctagccctgtacagtcagcaggtggcaaagccagacaggcttatgtccttctccttaggacggtgagttccccaggcctcaggttggtatacagatgccatccatgagccagggattggagtaaaaatccttagaaatctacctggtgttcctttgcactgcagctgagctggcactcaaactacaagctagagcccttcccactcttccatcccctttccacaggcagagcagcctcactctgtggccaccaccagcacgggcccacagggagtgctgtcagactaccactgaggttccattaagggctaagagctcttcagtcagcttgtggtgaatgttgcctggtctgaggctgactcttcaagactcacccagggcaggtccagcaatgtcatccacgagccaaggcctggaatcagggaccccaagaggcttcttggtgctctatccctctgtggttgagctggcagctgaggtgcaagacaaggtcccctttactttttcctctgttattctcaagcaggtggggtctctgaccgtaaccaccacagctggcagtgtgctgtgttacatctgaagctggcatgtctcagagtctcacccagtgccatcgcatactacctgggtactgctgctagttattcagggtccaagggttgtttagtcagaaggtgatgggtcctcccatgactgaattcttcccttcaaggcagcaggttctgttttggtccagagtgtgtctagaaatattatctgggtgggcctggaatgggtcctcacaaccctgcccagtgccctatcctgtggctgaggtgacatccaaaatgcaagacaaagttctttttgctgttccctctcctctcctcgagtggaaggaaggagccacgtagcctggggttgcatgaggggtggcacaagcacacccttagctacctcaactggtgtctcagtaggttgtgctcccccaacccaaccaggtcccctggctcggagcccagctcagcacagcacatgcctaggggttgcagtccttgtggcctcgaccgcctttcaagtttatttaggacttcagagccctccagcccacagtggcaaggcttgccagatctcaagtcctgaccattggggtgggcgattcccctctggctgggctggtcgctatgcttactccctgggtaggcgtccgttgagttcagcccagttttgctttctgctatgacagggaagcactgagttctgtgcaacgtctgacagtcactgcgctttcccttcccaggagcacagattctccacaacaggcaggcactgctgggggatggggaggagtggcattggcaactcaagactctacagccccttttagtgccatttccagtaatacaaaattaaatccaggtactgtgagtgctcatttgatttttggttcttacaaaggtgatttttttctgtgttgatagtgtttaaatttggtgttctgggccgggtgtggtggctcacgcctgtaatcccagcactttgggaggctgaggcaggcggatcaactgaagtcaggaatttgagaccagcctggccaacatggcaaaaccgtgtctctactaaaaatacaaaaattagtcgagtgtggtggcaggtgcctgtaatcccagctacttgggaggctgaggcagggagaattagggagaattgcttgaaccccggaggcagaggttgcagtgagccaaggtagcactactggactccagccctggtgacagagcgagactctctcttaaaaaaaaaaaagaaaaaaaaaaggtgttctgttaagggtatgatgggtgcagctttctattccaccatcctgctctgttgcacctctcgagctcagtcctttcaaccggaaacactagagaaaccctaaagcctaggccctaagtccataacgcaggtggtatggaggtattcccatttcagtgaaactgtgtaaacacttagaaggtcagccttggatttggtagcagtatgtgaaatgctcagagataaaactgatcagagtggggaggtgatgttacttctctgcctggctccacattggagaaaggaacatggggttaagggaggaggaaggaagacagcgttgaggctcattctgtcatccaggtgaggtttaatggatgattgttggccaaggagatgtcgctagaattgtgatttacatttggtaaaggagcagctagattttctaatgcggtcggtaaggacatgcaagagggtttcaggtatgacgctgggggttttttgtttttgctttttttttttttttaggtggagtcttgttctgtcaccaggctggagtgcagtagcatgatctctgctcactgcaacctctgcctcccaggttcaagcaattctcctgcctcagcctcctgagtagctgggaccacaggaggcacacggcatcacgcccggctaatttttgtaattttagtagagacagagtttttcaccgtattggtcaggctggtcttgaactcctgacctcaggtgatccacccacctcagccttccaaagtgctgggattacagactcgagccaccgtgcctggcaaccctaggggttttggccttagcagcagcagtgatagaagctgtatcagctgagatgagcaagttgggagtaggcataatacagtcactgggaatataaggagggttgttttcaccatgctcagaccctgagatgcttgtccacataggtcgggatatctgggaaggaattgatattggagacatccagtatatgatagctaatgtgtggactaaggtgcgttagccatgggtcccattttggagggcacacttcataataaggtagtaaatcttttagggaaccagaaaggactgattggaggctgaggactagatgttttgcctgggtccctggcggacattattggcattcataacctgtgttatgcattcacacaggagagggaggtaagtgacaatgaatgtagggtgtatcagagggcatagcttgtcgtggggcagacttccatggagataatagagatgagatgcaggcagaagtacagaagtaattgagggaaaggtcatcattgctgaggggctggcaagtgtagcacagaagtagaatagggtcatggatagctgaagccacacatggttctgtgtttctgtggagccatgcaaggaggtcctcacagaattacttgagaccaccgctccttttaggatccaatagaattgcaattctgtggtaatattggatcggtttgaatgggccatacactctggatggtgtcagctacgatgtagtgtaaggccaaaaattaaggcccagtgtgatttgccacctggatgcctggtcatattggtatgaccacaaatggctgagtgcaagtttctttcccatttaactctctttttatatatttaaaattttttctctcgtgtatgtatgtagaaacatggtcttgccttgtcgtccaggctgttcttgaactcctacgatcaagcagtgcttccacttcgacctctcagagtgctgggattacaggtgtgagacaccatgactggccacttcactctcttaagtaatatatctgaacgggtgcagtgcctcatgcctataatcctagcactttaggaggccgagatgggtggatcatttgacatcaggagtttgaaaccagcctgcccaatatggtgaaagaccatctctactaaaaatacaaaaattaaccaggcatggtggtacactcatgtaatcccagctactgaggagctgaggcaagagaattgcttgaacccaggaggcggaggttgcagtgagctgagattgcaccaccccgctccagcctgggtgacagtgagactccgtcataaaaaaaaaaaaaaaaaaaaaggaatgtatcctagcctctgaagcctttcgatcaatgaatgggaccaggcagagttcctgttatagtttgtagtgagtttcaattccatttttatctccagagttattcaaataagtcaatggcatcctcctgagggaatcaggccattacactctcttcatcttacaaagcttgcatgccatggccgtggttgctctcttttatccacaatccaacccccatgtggctctttgtggtgagtggtgtccctcttatcaggctgttaatatatgtgataccttttttttttttgaggcacaattttgcttttgttgcccaggctggagtgcaatggcgcgatcttgactcactgcaaccttcgcctccctggttcaagtgattctcctgcctcaacctcctgagtagctgggatcacaggtgcccaccaccacgctcagctagttttttttttgttttgttttttttttttggtttggttttgtttgagatggagtctcgctctgtagcccaggctggagtgcagtggtgctatttcggctcactgcaagctccgcctcccaggttcacgccattctcctgcctcagcctcccaagtatctgggactacaggtgcccgccacaacacccagctaattttttgtatttttagtagagacggggtttcaccgtgttaggcaggatggtctcgatctcctgacctcgtcatctgcccgtctcagcctcccaaagtgctgggattacaggcatgagccacgcccccggcctagtttttttgtatttttagtagagacgcagtttcactatattggccaggctggtctcaaactcctgacctcaggcgatccacccggctcagcctcctaaagcactggtactacaggtgcgagccaccacgcctggctcaatacatttgatttggaaactgctcttgacgacatctgtagaatatcagatgtcatttgttttaccaaaaatgtaaccctagggggagatttcaacccacactagtagaagacaaaggaggaaattaagatactttaagttggctggacacagtgcctcatgcctgtagtcccagcactttgggaagctgaggtgggtggatcacaaagtcaggagttcgagaccagcctggccaacatggtgaaatcctatctctactaaaaatacataaattagccaggtgtggtggtgcacacctgtaatcccagctgttcaggaggctgaggcaggagaatcctcaggagaacccaggaggcagaggttgcagtgagtctagatcgtgtcattgcactccgtctcaaaaaaaaataaaaaaaaaaagatactttaaattgtggccgggcacagtggctcaagcctgtaatcccagtactttgggaggccgaggcagatggatcatgaggttaagagatcaagaccatcctggccaacatgatgaaaccccgtctctactaaaaatataaaaattagccagatgtggtggcgggtgcctgtagccccagctacttaggaggctgaggcagaagaattgctggaacccaggaggcagaggttgcagtgagccgagattgtgccactgcactccagcctggcagcagagggagactccatctcaaacaaacaaacaaacaaaaaaagatactttaagttgtttaaaggccagagagaggccagtggtgtgtggcagtcagctggggatggacatggaatgtacctggaagtctaaagaatgaggtgcgttcagagagggtatctctgctgtgctgaaggtgccacattgggcttcccatgacctcggccatactagggaaagtgcctgtcaggagtgggtggactttatgtcacagccactgcacagatacctatttgttcaactaactattgttggtggctgtaccccatgaccagtgggcctagtttctcctatgtttgaggaccttgagaggaggatgtgcgagagtagatgtgtgggagagatggattgtgatacctcagcataggggtggtttgtggtttcatctgtcaacatcataacagggcacagtgacttttgaagacgtggctgtgaaatttacccaggaggaatggaatctccttagtgaggctcagagatgcctgtaccgtgatgtgactctggagaacctggcacttatgtcctccctgggtaagttgctcacactcaccctgtgacttgagctagtctctgttttcccctgtctttccccattggcaagactttctcatgtcaggagcatggacacagcttcctgcttcagttctatgggtaggttcttggttgtaggactgaggtgtacatactgccctactcctttcttggagcagccccagcacctgctttactgcaggctcccagggagggattcccagtcagaagcccaccttgttagtcctgtggatgtttgggtgtccttgtccagatttcaggttcctgtgtacccacagtctacttcctttctctagctgctattttcttatgccttcctgtggcaggaattgccttcacagactacatcactgcctatatagaccagaggctgttcttgcaagatcttctttagaaattctccttcaaatactcagtttttttctctcatgggctgagttgttctgagacaatgttggctgttcccttgttctgtctttcccttagtctgtgcatcattcatgtcccatgtatttggtcatcattgtggtgggaggcacagtcctccatttgatccagaagatgcaaatgaattcagcctcagcataataggctcagaaggagtgagtccctaaagagtggcaccctgggctggggatggtggctcgctcctgtaatcccagcactttgggaggccctggcaggtggatcataaggtcaggagttcaagaccagcctggccaagatggtgaaaccctgtctctactaaatataaaaaaatcactcgagcatgatggcatgtgcctgtagtcccagcgactcaggaggctgaggcagagaactgcttgaacccaggaggcagaggtggtgagcccagatcacgccactgcactccagcctgggcaacagagcgagactctgtctccaaaaaaaaaaaaaaaaaaaaaaaaaaaaaaaaaaaaagcagcaccctggaggaggtcatggagtcagggctttattgaaagcataccaggaacctattctactttagtagcatttttgtggcaagagaagtaggcacacataatttgtcttttcttcctcattcttgagaacatcacacttgtcacttgtctatcttatcatttctactcctttttttaagctttgacctacttgtacatgaactcgtaccctaatatccattctcctatctaatcttcacatctctggaccccaaatctcatccattttacatatgtcaccatttgcgtgttctccagtatttgcatagagatttgtgttagcaagtatatacgctttgttacaaactgtcctcaagcagaagctgctgtgttgtgcttgtgttttccttggcctggacaaatccctctctacagcactcacatgtcatgaggacataaattctgcagatgagtggtttgcagatgcagggattgtagaccctgcctctactccctgtgttacatacatggttgtgtcctttaacttatgaggcctcctacattctgtgaccgttatagtccagtaataatacatagcaccatcttccatctgaagccaacatcctgttcctccaagtagttccttggagtaattcctcagtttttcacatacacttgtgggtggtctgtgccttcccaccagagttaacatgcacttcaccagcattttcttgctttcaggttgttggtgtggagtggaagatgaggcggcaccttctaagcagagtatttatatacaaagagagactcaggtcaggactcctgtgacaggtgtgtctcccaagaaggcccacccctgtgagatgtgtggcccgatcttgggagacattttgcatgtggcagatcatcagggaacacatcacaagcagaaactgcacaggtgtgaggcctgggggaataaattgtatgacagtggaaactttcatcagcaccagaatgagcacattggagagaaaccctacagagggagtgttgaggaggcgttgtttgtgaagaggtgtaagttgcatgtgtcaggggagtcatctgtcttcagtgagagtgggaaggactttttgcccaggtcaggattactccagcaggaggccagtcacactggggagaagtcaaacagcaaaactgagtgtgtgtctccctttcagtgtgggggagctcactatagccatggagattccatgaaacattttagcaccaaacatatactcagtcagcaccagagacttctccctcgagaagaatgttatgtgtgctgtgaatgtgggaaatcctttagcaaatatgttagcttcagtaatcatcagagagttcacagtggaaaaagaccttatgaatgtggagaatgtgagaaatcttttagtcaaaagagcagcctcattcaacatcagcaatttcacactggaggaaaaccttatgggtgtgaagaatgtgggaaatattttagcttagaaggatatcttaggcgccatcaaaaagttcacgctggaaaagggccttatgagtgtggagaatgtgggaaatcttttagttcaaacgtgaaccttaagagtcatcagcgcattcacactggagagagaccttacaagtgtggagaatgtgagaaatcttttagtcggaagcccagccttagttaccatcagcgcattcacactgaagtaagaccttacaagtgtggagaatgtgggaaatcttatatttcaaaggggcaccttaggatccatcagcgcatgcacactggagaaagaccttacaagtgtggagactgtgggaaatcttttaatgaaaaaggacaccttaggagtcatcagcgagttcacactacagaaagaccttataagtgtggggaatgtgggaaatgttttagtcacaagggtaacctcattctacaccagcatggccatactagaaaaaggccttatatgtgttgggaatgtggaaaattatttaagaagaagtctcacctccttgtacaccagagaattcacagtggagagaagccatatgcttgtgaggcttgtcagaaattttttaggcacaagtgccacctcactgcacaccagagagttcacactggagaaaggccatatgaatgcagtgattgtgggaagtcatttacccacagctgtgcattcattgttcataagagagttcacactggtcagaagccttatgagtgcagtgaatgtgggaaatcttttgctgcaagctcctatctcactagtcacaggagagttcacactggtcagaagccttatgagtgcagtgaatgtgggaaatcttttgctggaatctccagtctcactaatcacaggagagttcacactggagaaaagccttatgggtgtagtgaatgtgaaaaaaaatttaggaaaagctcttcacttcgttaccatcagagagttcatgaaagaaaggccttatgagtgcagagaatgagtccagtctcattaaatacaggagagcacacacctgagtaagatcttgtgattgcagcaaatgtggaaaatgtttacccaaaagaagtctgctctccttggacattggagagttcacaccagagaaaagtccttacaagtaaaataaatttggcagttttgtagccacacctctgtattccttcaggattatatttaacactgaatgaaggccttactagtgtggcaaatataggctatttatccagaagtctggcttcaaaactcacaggagagctgtcactacggaaatgccttttgaatgtaatgtttgcaaaaaagcactgtgccttctgtcattgaatcctagaacactgagatgagaaaaacactgtagatgtataggttagatatatagggaatgttattattttttcctttttttggagagacggtctcactccatcacccatgctggtgtgcagtgctgcgatcgtagctcactgcatcctccgccccctaggctcaagtgatcttcccaccttagcctccatgtagctgggtccacaggcatgcaccaccatgcctggctattttctcatattagtagatatagggttttaccatgtttccaggctggtatcgaactcctgagctcaagcaatctgtacacctcagcctcccaaagtgctgagattgtaggtttgagtcactgtgctcagccaattatgtttttctgtgtaacatgggaggagatcctttgagggcaccatgtgcccaaattgaaaaaactccaggcatgtggcatctgtattatattttttactatgccctgttatcttgctagacttatgtgactgccacttatctggcaaaagccattacatctcagctacttggtaggtacccacattgcatcattcacctatttcgtattctagaagtatattttggttgtctcccattcacgagagattttttttttaagttttttgtttggttggttggttggttggttggttgtttttttttgttttttttttttttttttttggagacaaagtttcactgtcaccgatactggagtgcagtggtgtgatcctggttcattgcaacctctgcctcctgagttcaagcaattctcctttctcagcctcctgagtagctgggattacaggtgcctgccaccacacccaggtaatttttgtacttttagtagagatggggtttcactatgttggtcaaactgatcttgaactcctaacctcgtgatccacctgccttggcctcccaaagtgctgggattacagtgtgagcctctgcttctggcctttttaaaaattttttaaatttatattttttgtagagacagggtcttgctgtgttgcacagtctggtctcaaactgctggtctcgagtgatccttctgcctggcttcccagaatgttgggattataggcgtggcataagtcaccatgctgggacttttttatttctttaatttttaattccagatctggtcacagaaggatttgttgagtagcctcagcacttcttgctttttcatttctttctgataagttacaccatggaccttccccatttttgtcccagaggactcttgtgctgacttgaaaagatggactattttggctaagcatggtggctcatgcctgtaatcccaacactttgggaggccgaggtgggtggatcacaaggacaggaaggagttcaagaccagcctgggcaatatagtgaaatcctgtctcttctaaaaatataaaaattagccgggcatggtggcgcacctgtagccgcagctactcaggaggctgaggcaggaaaattgcttgaaccccgggaggtagaggttgcagtgagctgagatcatgccactgcactccagcctgggtcctgctaccttgaaggacagcatagctaaactgcgtggcccaagggacagcatgaatgcagaatatagctttcttcacttgtggcctatttgcatagctgcccaaggcctccagtggacgacttcatggctttgtggtcttcatctgtagcatggatactacagattgtgggttcataggtcagctgggtacagggcagtttttataacaacctctggtgggttttttattttagtgtcaatatcacactgaaagattggtgattttttttgaaccagacaaaattctctcttatgaggtatattgcactgtgctcggtactgttgagggaactctgttcagcagatcttacaaggcacacatgtgccatgatatccagaattctgtaaggcaacatcacaggttgtaaggctataggatgaaattataattttatggttacttagttactgcatttatagtcagcagaggggacagcaataaagtttttgaaatatatcttttttttttttttgagacacagtctcactctgtcacccaggctagagtgctgttgcaccatctcggctcactgcaacctgtgccttctgggttcaagcgattctcccacctcagtcacccaagtagctagaattacaggtgcatgccaccacaccactaatgttttgtggttttagtagagacgggtttcaccgtgttgcacagactggtcttgaattcaactcttgagctcaggtgatctgctcacctccgccttccaaagtgctgggactacaggtgtgggccgctgtgtttggctgaaatgtatgtcttttaaaggagtgtccacagttatccagtcactgtgtctgtgatggataagcagatacagaaattctcaagacttccataataatgaatgttgtgtagctaagctttggtcagaggaaataatctaaaggttttgtgaattcatgtaaccttttgggctgctcaccttaaggtaactcctgtattaacaggaggaacagaatagggaaaaagatctcagttcagtgatgtagctttgtgaccagccagtgatccagttcaatcaggtagaaatgaccttcctgctacatcaatatttgcttctatggaggctagtttccccacttagggcatgagaagaattggtaaagtcaacataaaattgccaaacctgtcaccaaaaatgatggcaaatctgtatttttctcttaaaccgtgttataaaagctgtaataaggtataggctgagcatcatggctcatgcctgtattcccagcactttgggaggccagattccttgagaccagtgtggggaacatggcaaaaccttgtctctaggaaaaatagccaggtatggtggcatgtaccttagtcttagtgatgtgggaggattgcttgagcctgggaggcagaagttgcagtgagctaagattgcaacgctgcagtccagcctgggtgatagagtgagaccccatcttaaaaataaaataaagatataaatgacatccaataaagtacacatatttgagctgtaggataagtcttgaattttattataatcccgtgaaaccatcatcagagtcaccataatgaatttatctaatctatcacctttgtatttacttggagcctttataaagtttttctctctgctcttcaaacaaccattgatttactttgctgtatgatggagtactttccattttctggaattttctgactgatgtaataaagtgtttcctcttataatccctgggtgctctcctgcatcatgcttattttgatgtcattgtagatatatgagttgttcattcgttttatgttgctgagaagtatagtctgccgtgaaatgtcattgtatattcattcattcatccatccatttatggatattttagttgctgcatactttttttttttttttttttcaagactctctaccaggttggagtgcagtggtgtgattttggctcattgcaacctccacctcccaggttcaagtgagtctcccacctcagcctcccacgtagctgggattacatgcgtaagccatcatgcccagctgttttttgtatttttagtagagatggggtttcactgtgttaccgggttcatctcaaactctgggcctcaagtgatctgcctgcattggcctacaaaagtgctcagattacaggcctgagccatgagccaccgcacctgtaattgattctgaggccaggcacgatggctcacgcctataatcccagcactttgggaagcgcaggtgggtggatcacttgaggtcaggagtttgagaccaggctggccaacatggtgaatccccatctgtactaaaaatacagaaattagccaggcatggtggcgcatgcctgtaatcccagctactcactcaggaggctgaggcaggagaatcacttgaacccaggaggcagaggttacagtgagctgagatcacaccactgcactccagcctgcgcaacagagtgagactctgtttcaaaaaagaaaaaaaaaaatttattctgagataatcccagttcccagtgtgaaactattcctgcagtcactggaaaataataaccactttcttgtaaggagatgaaattttggagctcagatgccgtgtttatattgttattcagatggcctttttaacctgtgctttaatggtgaaagttgtagcgactgatgtgtgtaccacaatggcattggctaagttgctcgtcctttgagatagatgtcaatgtgattaaagaaattgagtacaccttagcatatgaattaagaaacatattgacatagtgatcctcatagtgacatagatcagcaggacttgtgttctgagcactggtcatgaccctgctcatgatgaaacaggatctggtcaaaacaggatgcactaaagaaaccagctgaaagcagtaaaactaagatggcaagaatatgaactctagttaccctcattgcctcactgctcattatatgctcattataatgtattagcatgctaaaagacactcccaccagcaccatggccgtttacaaatgctatggcaatgcccagaagctacctcatgtagtttaaaagagaaggaacccctggttctgggaactccccactctttttctagaaaattcatgaataacccacctcttatttagcacataattaaggagtagctataaatatagctagccaacaatccacgggtgctactttgcctgtggagtagccctgctctgtctgtggagcagccattttcctgttctcttgctctcataaacttgctttgccttcactttacactcttggcttgctcttgaattatttcctttatgaagccaggaaccctcctggattgagccccaattttgggatttgctagcatcactagagcaattttctgtgggaaccagtggccaactgccagcttcactacctgcttcagggtgtaccaacatccgtctatttccctgtcattagatctttattattattttatttttttgagacggagtctagctctgtcgccaggctggagtgcagtcatgcgatctcagctcattgcaacctctgcctccagagttcaggcgattctcctgcctcagcctcccgagtagctgggactacaggtgtctgccaccatgcccagcaatttttttaacatgggttttgctgtgttagccaggatggtcttgatctcctgacttcatgatctgtccacctcggcctcccaaagtgctgggattacaggcgtgagcaaccgtgcccggctaatttttttatttttattagagatggggtttcaccatattggtcaggctggtctcgaactcctgacctcatgatccacctgactcagcctcccaaagtgttgggattataggcatgagccactgcacccagcaatttatttattttttattttttattttttttgagacagagtctcactcctgttgcccaggctggagtgcaatggcatgatctcgactcatcgcaacctccacctccagggttcaagtaattctcctacctcagcctcccgagtagctggaattggaggcatgcagcaccatgcctggaaaattttgtactttcagtagagacacggtttctccatgttggccaggctggtctcgaactcccgacctcaggtgatccacctgccttggcctcccaaagtgctgggattacaggtgtgagccaccatgtctggcctttatttttattttttgtgggtatatagtagtgtatatatttgtagattacattagatattttgatgtagccatgccatatgtgataatcacatagggtaaatggggtctcagtcacctcaacatttatcctctgtattataaacagtccagttatactcttttagttatttttaaatatataattaaattattttgactatagccaccctgttatggtagcaaatattaggtcttattcatttttgctcactgttttttgtacccatcctgtcatcatgtcttatggagaattttcttttgttcccaacaaaacaatgaaactcgcaaaactgactgtaatgattcagtctacgtgaatttaaagagcaatcaatacttaatgttctcagctctgagtgcacacattgtaagtctgaatgatgccaatgatatggccacttagataagtaaagtttgggagcatctcaaatagtatttttattctctgggtgcaggatgagcttcctagagtctgatgtgatacctatttgatgcttttacaaagaatcaataatcttcctcctttgaggtgtgagcagggctttccagcagccctcagaatgtaacatggtctgcattcggtttgctcttggaggataccaccattgttggctgagagctctgggaagtactttacccagaaggcgctagttgcaaggcccaggatgagggatttctgggcatgcttgtcaggccagggagtactgggttgggactgagaaggcacaagaggagtagtcatctctgctcccaagtggcaggtctgaggctcataggcactggctggggtgatgcctgctccacccacagttgatggcagcagccacactgagggacctagctcaggtaaatgctgtgtattacaggcttcaccccagctagagtaatacaggtagaggaaccaataggtacaaaggcttggaggtgcatctgagccatgaacatttcagaacctggtaaccatgttgtgtcatggaaagtggggaactacattacccagaaagctctgctttaaacgacagccggtcagagccagtgagcactcggaaagaaggcatttccacgtgtgcacgtaacgtaaggccgagacttccggggtctctagtagcggctgtgtatcggcgatgcgggtgtttccccagtttgtggcccctgagtgctgggtgggaccgcggtgactgaacctagaaggtggagaggaatcgtcctcggtgcccagaggcggctctgcagccccgtgacggcgaccactgctcccgggccgtgcttccccaagtagtccgatggcagcggctgtgccgaggcgcccaactcaggtaattgtggtgccttctgtgccctcaggtcaccccatcgtcacccaggtcctaaaccagcgagggagcggctcctgctcgtgggtctgtagccggtacccggcgtaggaacactgaggcgctcacaggaggcctctccttgtaaccgtccagtgggttcacgttgccagctgcctagacagagccgatttatgaagactggggaattgcgatggagaaatagtaattcacgcagagccgtcctgctgttcgggagacaggagttttattattcaaatcagtctccctgagcattctgggatcagagttttcaaaatttggcgggtaggggcttgggaagtggggagtgctgatcagtctggttggagatggattcatagggggttaaagtgagtttttcatgctgttttctgttctgggtgggatggcagaactgattgacccagattaccggtctgtgtgttgtccgctgatccatccagtgcaggatctgcaaaatgccccaagcactgatcttagatattggggaaaccagccccacaccacccagcagataccccgagtcctgcggagacaaaggagttagaaagagacagaatacgcatttaaaaggcgggtccaggtggccagagcattggaggcttcctggcggcccagagctcttgggctccacccagtttattggtttacaagctctttgttcttatggctgattggagggggaggaagcgatcaggaaaaggattaatcagtaaaggagaactcgtgagtcattccataagatgtaaagcactggccgtttctgtgaatttccttgaacaaaggcgtgtgtctaaactacttaagatctttaacttaactgaaacgggtggctgcgggtttcaggaggagccaagatgtttgattatgctccactgcttcaagggagtgtgatctccctgagcaacccatggaatgctgctgaagagttatgctctcggggcataaagacatgaaggcaataaggagacttttctcctcagaggccgcccatggcttcccatgggtgtctcacacaggggagaccaactcaactagcaccccagaaactcacattaggttttacaatagtaaggttatcttcaggagcaacttggggaggttcagactcttggagccagaagctgcatgacccctaaaccgtaatttctattcttgtagctaatttgttagtcctgcaaagacaggctggtccccaggcaagaaaggggtcttttcaggaaagggctattatcaattttgtttcagagtgaaaccatgaactgaattcttttccaaagttaattcagcctatgcccaggaatgaaaaaagacggctgaaaggttggaagcaagatggagtcggttaggtctgatttctttcactgtcataatttcgtcagttataattttgcaaagtcggtttcacctgtttctgacaccagtgggatgcagtggggagagtgacaggcacaggtaggggtgcaggcaatggcctgcagatggacagagctggaaggatggaacctggggttcacaggcatctgtcaggaacaacgtgtgagatggagctcttcctggtagagcaagcaggccaggggctgtgcattcatcatgaggattctagaagccatggagagttttgaagaaaggagggacatgatccaaatccaggcttttaagaagtttcccaaaggccaatcaaaggaagaacatcatagagagagaggatgaggactttggggccttgggaggttgaatccgttttgtagatcacatagatggtagagatgacattttgcactgagaaaagcaggtcagacaaccagccttagggttacctggttccagggacaagaaagggttcagggagtcctgagcttatcaaatcctgtgacatgtttgtaatgtctgcctttcccctcaggcactcctggctgcagaagcacttagggaacccacacagggaagtggagggtgttccattccctcattggtcctgacgccatctacaggttctctagcttgtggtgtcctgggactcttaagtgccatttttttcagtcctttgatccgaggaccctggagaatctctgaagccaggataccaagtccatgacaggttatatggaggtattcccatttctgtcaaccaatgtaaacacccttgtaagattaacccaggatttgctaccaggttgtgaaatgcttagagataaaacggatcaaagtcaggaggtgatattaccacagttctacctggctacaggcttcatctggctggaccttgttgcatagactgtgggttgagggaagaggaagaaaggtcagagataaggctcctgccataatccaggtgagggttaatggatcagataagtggtaaatcacatgggtctggattcaggattcactttttgtaaagagacagctaggttttcttttttttttcttaacgtggaatttcagtcttgttgcccaggctggagtgcaatggcgcaatcttgggctcactggagcctctgcctcccaggttcaagcaattctcctgcctcagcattcaaggtagctggcattacaggcacccaccatcatgcccagctaatttttgtatttttagtagagacgaggttttaccatgttggccaggctggtctcgaactcctgacctcaagtgatcgtcacatctcggcctcccaaagtgctgggattataggcatggaccaatgcgcccagccgagacagctaggcttttttttttttttttttttttttttttttgagacggagtttcactctcttgtccagcctggagtctagtggcacaatctcagcccactgcaaccttcacctcctgggctcaagtgattctcctgcctcagcctcctgagtagctgggattacaggcatgtaccaccacactcggctaatttttctatttttagtaaagtcggggtttcaccatgttggccaggctagtctcaaactcctgacctcaggagattcgctggcctctgcctccccaagtgctgggattataggcacgagccaccatgccttgcagacagctagattttctaatgtggatgataggagcatgaaagaggaatcgggcatgagcccaaggtttttgatcttagcagctgtaaccatgcacactgcttcagctgagatgacgttggtattgacataatattcactgtggatatccagagggttgttttggccatatgaagaatcagagaccaataagtggtggcatcaaatcgataactagacatactggatggggtatctgggagggtgttgatactggagacatccaatatatgaaagctaatgagtgaactatgattagttatgggtccatttaggaggacatgcttcagattatggtggtaaatcttttcagggggcagaaaggtgtgattacaggctgaggactggatctcttacttacgtcctcaattgatgttattgggcttcctaaacacctgagagggtgtgagtgaccatcataacaggacatttaatacagtagagtttggaaggggacatagacatccaaagagataatagagaagagatagatgcatgcagaagcacaggagtaattcagggaagatgacacttaggcctgagttggtgccaaagttgtaacttttttgtttttttttttttttcagatggagtttcgctcttgttgcccaagctggagtgcaatggtgccatctcggctcactgcaacctccacctcctgggttcaagcaattctcctgcctcagcctcccaagtagctagtattacaggcacctgccaccacagcaggctaatttttgtattttcggtagagacagggtttcaccatgctgaccaggctagtcttgaactcctgaccgggtgatctgcctgcctcggcctcaaagtgctggaattgcaggcgtgagccactgtgcctggccagttgtaactatttatcactgtctggactcataaacattttgagatgactttgggagtgcctggggagtttcattcagcctggtgcatatgggcagtgaaaaatatgctcatctgtgatagtagatgtggtttggttcacaaatccaggggctgggctttaaacggcattaggtggacagaggagggttgctacagctgaggtctcagctggtgcagcacaaaagtgaaatagggccatggctatctgaagccatatgtggttctgtgtggctatggagtcattccaggagacgttcacaggatgatttgggattaccactgctattgtaaaccatggaaattctgtgttaatattggatgctatttgtatttgtcaagcatagtctggatgcttatccacattttggtataaggccagaattgaaggcccaatatgatgtgtcactttgacatcttgtgaaagtgggacaaccttaaaaggtgtgagtacaaatctcattcccactctgctctcttgaataatgtatcctagcctaacagcccgttttatcaaggtgataaggcagggttccaggttgttatattttgtggtgggtttcaattccatccctaccagcagagttatggaaacaaaccattgcatattcccaagggaatcatgggccgttataccctcttcatcttgtgaaataattttatttgtaggcgctgggtgtggtggctcacccctataatctcctcactttcagaggccaaggctggtggatcacttgagaccagaaattcaagaccagcctggccaacatggtgaaaccccgtctctactaaaaaaaaaaaatacaggccaggcatggtggctcaagcctggaatcccagcactttgggatgctgaggtgggtggatcaggaagtatggagatcgagaccatcctggctaacacagtgaaaccccgtctctactaaaaaaaaaaaaatacaaaaaattagccagctgtggtggtgggcacctgtagtcccagctactcgggaggctgaggcaggagaatggcctgaacctgggaggcagagcttgcactgagctgagatcatgctactgccctccagcctgggggacacagcaagactccgtctcaaaaaaaaaaaattagccgagtgtagtggtacatggctgtaatcccagctacttgggaggctgaggcacaagaatcacttgaacctgggaggcggaggctgcagtgagccatgattgtgttcctgcactccagcctgggtggcagagctagactatgtctcaaaaaaatcccccaaaaataaacttttacttctggggatgccagagaggggctgaaggttggggaaactctggtgggggtggccatgggcatgtgtctgtacagtataaagaatgatatatatttaatgagagcgaggttgtctgatggactcaggcagctgccttgggctttacgtgaccttggatatcgctgttcagaagggggtgtgggctttttttgttttttttttttttgagatggtgtctcgctctgttggccagggtggagtgcagtggtgtgatctcggctcactacaaaccccgcctcctgggttcacgccattctccggcctcagcctcccgagtagctgggactacaggtgcccaccaccatgcccggctaattttttgtatttttagtagagacagggtttcaccatgttaaccagcatagtctctatcccctgactgcaagatctgcccgaatcagtgtcccaaagtgctgggattacaggcgtgagccaccgcacccagcccagaagggagtggacctttttatgtcaggacctcagcatggatacctatttgtccacctacttcttgttgctgatggcatttgaccagcaggcccatgaagagacaaaggcaccagtggatgtggtttcaactccgtgttggggaccttgggaggaggatgggcaagggtgggtgtgtgggagaggtgggttgtggtacctcagcagaggggctgcttgtggtttcatctgtcactatcatagcagggcactgtgacctttgaagatgtggctgtgaacttttcccaggaggagtggtgtcttcttagtgaggctcagaggtgcttgtaccgtgatgtgatgctagagaacctggctctcatatcctcgctgggtaagttgctcacgctcacctttgtgacctgagctagtgttactgttcccctgtttttcattgacaggactgtctttctcacctaaggagcctggacacaggttccttctgcacttctctgtgtaagttgtgtggttcgtaggagtaaggtgtgtgtattgccttttcctctcctgttttttttttttttctgagacagtgtctcgctctgtcacccaggctggagtacagcggcgccatctcggctcactgcaagctccacctcccgggttcatgccgttctcctgcctcagcctctcaagtagctgggactacaggcgactaccaccacgcctggctaattttttttgttttttagtagagacgaggtttcaccgtgttagccaggatggtcttgatctcctgacctcgtgatccacctgccttggcctcccaaagtgctgggattataggcgtgagccaccacgcccagccaccttttcctctccttaagcagctccaacacctgctttgctccaggctcccagggaaggagtcagagtcaggagtcttataggcaccttaatgtatccactttgcctgcctctggctgtcaggtgactgtccaaatcggtagctcttgtgtgcccaggttctattaacacttccttcctctatctgacaatgctttgtgcctccctgtgccaagaattgccttcattgacattgtcactacctacatagaccatagaccatagactcttcttgcaagaccctgcttaggaattcttttgtaatacttaccttactctcctgtgggctgtcaggtgcttagttgtcctgagctagtgttggctgttcatctctgctatctctcctttcatagttacatcgtcgggtcctatgtactgggtgtgagatggagagtcctccatgtttgacaagatgtggttcaattcaggctcatcacgataggctcaaagggagcctgtccctcaggagtgccatgctgggggagggcatgacttcaggggtttatccaaatcataccagaaaccatttacatttgccaagtatttttggggcaatatgagtaggcacacactatttgtctttttctccccattgttgagagtttcacatgtgttagttctgtaccttttcatttctgcagtgatatccaccccagcactaatactcacatttctggactccacatctcacccatttttcttttgctttcatctgcagttgtctctgatattggtgtattgattacgtattaggaagtgtatgcccatggttaaaccatctatgaccacccctgctgtgttgtactcatgttttcttggtcttcacatgtttctatatatatatagatgtatatatatgtgtgtatgtgtatatatatatatgtgtgtgtgtatatgtatatttttgagagagagttttgctcttgttgcccaagctggagtgcaatggtatgatctcggctcagtgtaacctctgcctcctgggttcaagcgattctcctgcctcagcctcccaagtagctgggattacaggcacatgccaccatgcctgactgactttttgtatttttagtagatacagggtttcactatattagccaggctggtctcgaactcctgacgtcaggtgatctgcccgcctcggccttgcaaagtgctgggattacaggagtgagccaccgtgcccggcccatattcttctatatagcactcacatgtcatcaggagataaggtcctgtacacaacttgtttgtagaggaaggagctgtagaccctgcctctactccctgtgttgcatatatgcttgtgctctttacatcatgaagcctcctggattctgtgacctttatagcccaggaattctaagaagccccatctttttttttttttttttttttgtgattgagtctcactctgttgtccaggctggggtgcagtggcgtaatcactgctcactacaaacctctgccttctgggttcaaatgattctcctgctttagcctcccgagtagctgggattacaggtgtccacaaccacatccagctaatttttgtatttttagtagagatggggtttcaccatgttgttcatgctggtcttgaacttctgacctcaggtgatccacccgcctcagcctcccaaagtgctgggattacaggtgtgagccaccatgcccagccagcagccccatcttcaacttgaagccaacattgtgttcctgcaaatatttctatagattaattcctcaatttgtgagacgtacttgtgggtgggctgtgccttcccgccggaggtactttgcacttgaccagcattttcttgctttcaggttgttggtgtggatcaaaagatgaggaggcaccttgtaagcagagaatttctgtacaaagagagtctcagagcaggactcctagggcaggtgtttctcctaagaaggctcacccctgtgaaatgtgtggcctcatcttggaggatgtttttcactttgctgaccaccaggaaactcatcacaagcagaagctgaacaggagtggagcatgtggaaaaaacttggatgacactgcataccttcatcagcaccagaagcagcatattggagagaaattctacagaaagagtgtcagagaagcatcgtttgtaaagaaacgtaagctcagggtgtcacaggagccatttgtcttccgcgagtttgggaaggacgttctgcccagttcaggattgtgccaagaagaagctgctgtagagaagacagacagtgaaactatgcatggcccaccctttcaggagggaaaaactaattacagttgtggaaaacgcacaaaagccttcagcaccaaacactcagttattccacaccagaaacttttcactagagatggatgttatgtgtgcagtgattgtggaaaatcctttagcagatatgtcagcttcagtaatcatcagcgagatcacactgcaaaaggaccttatgattgtggagagtgtgggaaatcttatagtcgaaagagcagccttattcaacatcagcgagtccacactggacagacagcttatccctgtgaggagtgcgggaaatcttttagtcagaagggcagccttattagccatcagcttgttcacactggagaagggccttatgagtgtagagaatgtgggaaatcttttggtcaaaagggtaacctcattcaacatcagcaaggtcacactggagagagagcttatcactgtggggaatgtgggaaatcttttcgtcagaagttctgctttattaaccatcagcgtgttcacactggagaaaggccttacaagtgtggagaatgtgggaaatcttttggtcaaaagggcaacctcgttcaccatcagcgaggtcatactggagaaaggccctatgagtgcaaggaatgtgggaaatcatttaggtacagatcccacctcactgaacaccagagacttcacactggggaaagaccttacaattgtagggaatgtgggaaattatttaacaggaagtatcatcttctggttcatgagagagttcacactggagaaaggccatatgcgtgtgaggtatgtgggaaattatttggcaataagcacagcgtgactatacatcagaggattcacactggagaaaggccgtatgaatgcagtgaatgtgggaaatcatttctttccagctctgcgcttcatgttcataaaagagttcattctggacaaaagccttataagtgcagtgaatgtggaaaatccttttctgaatgttccagtctcattaaacacaggagaattcacactggagaaaggccttatgaatgcaccaaatgtggaaaaacatttcagcgaagctctaccctccttcatcatcagagttcacacaggagaaaggccttatgagtgcagtgaatatgggaaatcgtttgctgaagcatcccgtctcgttaaacacaggagagttcatactggagaaaggccttatgagtgctgtcaatgtggaaaacatcagaatgtctgctgtcctcggtcttaagcgacttcgtgttgagatggagtcttgttctgtcacccaggctggagtgcagtggtgcagtcttggctcgctgcaacttgggcctcctgggttcatgcaatcctcctacctcagcctcctgagtagctgggattatgagtacacaccaccacgcccagctaatttttgtgtttttagtggagatggggttttaccatgttggccaggctggtctcaaactcctgacctcaagtgatccacccaccttgactcccaaagtgctgaaattacaggcatgagcctctgcacctggccttcattcttttcgtattgcttagaatatgacatgctgaaccaggcatggtggctcatgcttgtaaacctgatgctttgggaggacaaggtggttcattggaggccaggagttagagatcagcctgggcaacatagccagacctcctctctacaaaaagaaaaaagaatgacatgcttcttgtttttgtctgttataaatgaaactgctatatttgaatgcagttgttcatgtaggtatgtttcactatggtaatatggtggtgtgcagtgcctgagtcacgtgatagattaaagtacaactcttttttgagacagagtctcactctgtcacccaggcgggagttaggtggcatgatttcggctcactgcaacctctgcctcccaagttcaactgattcttctgcctcagcctcccgagtagcagggattaccggtgtgcaccaccatgcctggataacttttttttttatttctattagcaatggggtttcaccatgctggccaggcttgttatgaactgacctcaagtgatctgcctgcctcagcttctcaggtgtgacctactgtgcttggcctaatgtacaactttttaagcaatgccaaactatgacttaagaatgaaattattgctcatttgtatatctatctaccatcagtgtccaagaatttctgttctatcttaccaagagggagtatggttagtatttgaaattgtttattattttaataagtggttataacttttgagtcagtggtttatgttttgcattttttttgttttgagacaaagtctcgctctgtctcccaggctagagtaccgtggcacaatctcagctcattgcaacctctgcttcctgggctcaagcactctgcccacctcagcctccagagtagctggaaatacaggtatgcaccaccacaactggataacttttgtattttctgtagagagggttttacctttttgcccagtctgatcgcgaactcctgggctcaggcgatccacttgcctaggctccaaaagtgcttggtctacaggggtgaggcaccctgcctggcctcacctgtaggcttgttttttaaaatgaattttatctatttcccatttcattaatatatttaaaaataatgaaataacaaagacgtatgttggacttcattcattcttcagtgatgtcactttgctgcaaggaatatttggttttcttttttttttttttttccagatggagtctagctctgtctcctaagctacagtgaagtggcatgatctcggcccactgcaacctccacctcctgtgttcaagcgattctgcctcagcctcctgagtagctgggactacaggcatgtgccattatacctggctaattttatttatttattttagtagagatggggtttcaccatgttacccaggctgctctctaccttctgagctcaagtgatccacctgcctcggcctcccaaagtgctgggattacaggtgtcagccactgtacctggctgaatacttggttttcagtaccacaagaactatgagctggttatccacttcatgtggaatcataagcgtcccaaagtgacaatacatatagattgccaggcagtgaaacagttaagatgccaccatagctttcttttcaacatctttctaagattaccttactatttcttttgttccaagtttgtacttcctcacagttctcacatatggaaaggatacacactttgtagaaacaagaactttatgttatccaagttctaggatagccatgagctccaattatctcagagctctgagtcctctactcaatacccattgagatttatgtgttctgaggcttttgtcttctagctacttacttcattctccatgggtaacgtcattcatccacattaactaatttcctcactccaagctcttttctagagataatctccagtccctgtgcagaaactgtcattgcactttctgctgaaatggcagtttcttctcagcaaggtgagattatggaatccagaatcttttttcaggggtcacatgcccatttccccacttgcatgaatgtcgacactgcagccacagttttggccgtaaatgtgaatttggcaagtaaccactgttcccagggaaatgtcccaatcagaagaagattatctgggacactgatactgacagggagatgggacattctgagggacccggaggcagggtgccacctcctcaacttccctgagggctgcctagaatctgtttcctctcactctgaattattcttcctcttatggctgaccaaaaacatggaacctcacaaagtccactgtaacagctttatatttgtgaagtgaagaacatgaagacagtttcaagcaaagttattgagtggacactttgtgttttttttgagaagtctcactctttcacccaggctggagtgcagtggcacgatctcggctcactgcaactccacctcccgggttcacgccattctcttgcctcagcctcctgagtagctgggaccacaagcgcccaccacgtcagcttaatttttttgttttgtttcttgagacagagtcttgctctcttgcccaggttggagtgccgtgtcgcaatctcagctcactgcaacttctacctcctggattcaagcacttctccttgcctcagccacctctttagctgggattacaggtgcgtgccaccacacccagctaatttttgtatttttagcagagaccaggtttcaccatgttggtcaggctggtctcaaactcctgacctcgtgatccacccacctcggcctcccaaagtgctggaattacaggcgtgagccactgcacctggcctgtattcttttctttagtagagacggggttttactgtatttgccaggatggtctcgatctccagacctcgtgatccgcccgccttagcctcccaaagtgctgggattataggcgtgagccaacacgccctggccacttcttgtctttgcaacattttttagatatgtatttgtgttttttggggagcttaatttgctaatggaatctctgttattttcctaacatgcttggtggatacaagagttaagacttcctgtcccgtttagtgtaacaaaagaaagttaagaaatgtggataaaagattgtaagttagaaatggcaagataatcagctatatgaagaatcttggccaggtgtggtggctgaggcctgtaatcccaccactttgggaggctgaggtgggcggatcacaaggtcaggagttcaagaccaccctggccaatattgtgaattcctgtctctactaaaaatacaaaaattagtcgggcatggtggcgggtgcctgtagtcccagctactcgggaggctgaggccagaaaatcggttgaacctgggaggtggaaggtgcactgagccaatatcacaccagtgcactccaacctggtgacagagagacacatcatctcaaaaaaaaaaaaaaaactcaatccataaatgttatactttataactttataacagcatgttatatgggcttagatattatccctaaatttttttttttttttttttttttgagacagagtctcactctgtcacccaggctgaagtgcaatggcatggtctcggctcactgcaacctccgcctcccaggttcaagtgattctcttgcctcagcctcccgagtagctgggcctataggttccctccaccacgcccagctaatttttgtatttttagtagagatgggctttcactacgttagccaggctggtctcaaactcctgacctcatgatccacccccctcggcctcctaaagtgctgggattacaggcatctgccaccgcactcggcttatccctagaaatcctatgatagcatgatgtataggcacctaaaggcatggcacttgagaaatgtgaataagattgtaagttacaaatagcaaggtacagtcagatgttaacagtctcagcccctaaatgtcaccttgtattacagcatgttatataagcacatacaggcacatacatgaaatagtgatacttcattctcagtaatatcttcatccttctcactggaaagatctttgatgatttttaatcaacataggagtttcaatgatatctagaagtttaaaagggctcgttcaaacaaattatgaccacacacactgaagagtatgtttgtctcttgtggtgtaaatttttttttattacaccaaattatgttcacacaaaacctttgtaatcagggggaattaaagagccttcctggaaaatggaggttgcaatcagccgagatggtgccatcgcactctagcctggggaatagagtgagatcctgcctcaaaaaaaacaaaaaaattctttattttctccataaactacagtttatataagcaaaagtttcagtactaagcaattttagtctctgcagtctcttgtcttgaattaatacaacttttgttaattctcttatgaagttaatcttcctgcttgtatgtgaattaaatatatgtcaaactttttttgtacaaaagattcatacctctttcctgtttgaaattattttactgtgtttcatcaatctaatgtttatttttattacaccagtaatttcctcattgtgttgaatcttacagtggcttataaatctacatgtacctagaaatgtttagccagtccatgtatatttgatgtggcacattttttcctttgaatcacatactctaagagaagtaacttcctcttgctaacctctactttccctaagtgttgaattaatcctctttagatgattataattctcttttcaatagctagaaagaatctataaggaactttcctggctgggtgtggtggctcatgcctgtaatcccagcacttcaggaggccgaggtgggtggatcacgaggtcaggagttccagaccagcctgaccaacatggttaaaccatgtctttactaaaaatgcaaaaattagcacctgtaatcccagctactcaggaggctgaggcatagaattgcttgaacctggcaggcagaggttgcagtgagttaagatcgtggcactgcactacagcatgggcaacagagcaagactctgtctcaaaaaaaaaaaaaagaaatcacagtccatgtctgaggggtgtacattgcttatcaatttggagagaaaataatagataatgtaatacaatgttaaaatagattaaaaattgagatagaaaaactgctcaatttatgcttcacataaaattgaaaattaaatcaagcctacacataaaggcattttttatatatatacatatatgtgtgtgtgtgtgtatatgtacacacatatatacgtatatatgtgtgtacatatacacacacacacacatactttttatgttatttttggagagaatcttgctctgctgcccaggctggaatgcagtagcatgatcatggctcactgcagccttgaccacccccagggttcaagtgatcgtgccacctcagcctgctgggtagctgggactacagacaggcaccctgcctggctaatttttgcattttttgtggacacagggttttgccatgttgcccaggctggtctcaatctcctcggctcaagtcaacagcctgcctctgcctcccaatgtgttgggattacaggaataaactactatgcccaactcaagattattttttaaatggtttattttcttagtaaattggggtgcacaagtcattaaaagcaaggattaaatttaaagggaaaaatttgttttacttttctacagaaaattaaaaccaaagcacattaaaagtgacaacacggccgggcacagtgactcacacctgtaatcccagcactttgagaggatgaggtgggcggatcacaaggtcaggagatcgagaccatcctggctaacacagtgaaaccccatctctactaaaaataccgaaagttagccaggtgtggtggcacgcacctgttgtcccagctactcaggaggctgaggcaggagaatggcatgaacccaggaggcggagtttgcagtgagccaagatcaggccactgcactccagcctgggcgacagagcgagattctgtctcaaaaaacaaaaaagcaacaacccaagatggaaatgacaaaagttacttaaaatgtgcaacataaaaggtagtcatttaggctgggtgcagtggttcatgcctgtaatcccactttgggaggccaagacaggtgggtcacttgaggacaggagttcgagaccagtcaggccaataccgtgaaacagtctctactaaaaatccaaaaattagccggatgtggtatcatgcacctgtaatcccagatgttcgggaggctgaggcatgagaatcgcttgaatgcaggagcagaggttgcagtaagctgtgatcatgccattgccctccagcctaggcaacagagctagatccttgtcttaaaaaaaaaaaaaaggaaaggagtcatctataattttactacttatacagattacattgagataaatcgcaaaatattaggcaaaactttaaaacaatttttaactatccagtatatcaaagagagatgccacacattgtatttgtttgcaagaatgtcattgtgattacaaaactgaccactaaccattcagttgaagttgattgagaacttaaaactatttccgtctatggccataccaccctgaacgcgcctgatctcgtctgatctcggaagctaagcagggtcgggcctggttactacttggatgggagaacttaaaactatttccttttttttttttttttgagatggagcctcactttgtcgcccaggctggagtgcagtggcgtgatctcggctcactgcaacctccgtctcctgggttcaagtgattctcttgcctcagcctcccaagtagctgggattacaggtgtgtgccactaagcccagctcatttttgtatttttagtagagacagggtttcaccatgttggccagagccaccgcattatttttcagccaggtgcagtggctcacacctgtaaccccgcactttgggaggccaaggtgggtggatcacctgaagttgggagtttgagaccagcccgatcaactttgaagaaaccgtctctactaaaaatgcaaaaacctagccgggcgtggtggcacgtgcctgtaatcccagctactcgggaggctgaggcaagaggatggcttgaactcaggaggcagaggttgtggtgagccgagatcacagcactgcactccagcctgggtgacaagagcaagactccgtctcaaaataaataaataaaaataaaaaataaacatgatgatcacagatgcagtcacattttctgagttcttgtctctctgccagtgccacccagatagcctcacaaaactttgacccagccactgttagtgtcgccaccgcccataaaggagctgagcccagcaggggcactgcctggggccctgtagccaaaaggctacagcaggagctgatgaccctcatgatgcctggtgacaaaagaatttctgcctaccctgaaagccttatcaaatggacaccatccatgaagcagctggcacagtgtatgaagatctgaggtataagctcttgctggagttcctcaatgactacccacctttacgatgcacccacagtgaagttcctcacaccctgctaccaccctaacgtggacacccagggtaacatatgcctggacatcctgaaggagaagtggtctgccccgtatgatatcaggaccatcctgctctctatccagtgcctgctaggacaactcaacattgatagccctttgaacacacatgctaccaagctctgggaaaaccccatagctttaagaagtacctgcaagggtcaggcgcagtggctcacacctgtaatcccagcactttgggaggccgaggtgggtggatggatcacctgacgtagagagtccaaggcctgacaaacatggagaaatgtcatccctatttaaaaaaataaaaaaattagccaagtgtggtggcgcatgcctgtaatcccagctactcgggaggctgaggcaggagaatcacttgaacctgggaggtggaggttgcagtgagccgagatctcgctattgcactccagcctgggcaacaagagtgaaactctgcctcaaaaaaaaataaaataaaataaaaataaaaataaggaagtacctgcaagaaagctactcaaagtaggtcaccagccaggagctctgacccaggctgcccagcctatccttgtgttgtctttttaattttcccttagatggtctgccctttccgtgatttctgtgtagaactctgtatcttgagctgtggtactatttttcttttgtcttttaatttaaaccttggtggagcccttgtgatgaatattaaatacatacattttgggctgggtgtggtgcctctagcctataatcccagcactttgggaggccgaggcaggcgaatcgtgaggtcaggagatcgagaccatcctgcctaacacggtgaaacctcgtctctactaaaaatacaaaaaaattagccgggcgtggtggcgggtgcctatagtcccagctgctcgggaggctgaggcaggagaatggcatgaacccgggaggtggagcttgcagtgagctgagattgcaccactgcactccaggctgggcacagagcaagactccatctcaaaaaaaaaaaaaaaaaaaagacaaaaagaaaacattttggtcattaaaaaacaaaaaaaaaatgatacgagagagcacccagggattataagaggaaacactttattacatcactcatctaacattccagaaaatggaaagtactctactgtacagcaaagtaaatcattggttgtctggagaacagaaagaaagcctttataaaaaggttccaagtaaatataaaggtgttaagttcattattgtgactatgttaatggtttcatgggattatatgaaactcaagatttatcacatgctacagcttaaatatgcatagcttactgaatgtcatttataactcatcacagctttaaaatatacttcagactggcagcagtggctcacacctgtattcccaccactctgggaggctgaggcaggcatatcacctgaggtcaggagtccaagatcagcctggccaacatggcaaaactccgtctctactaaaaatacaaaacttggccgggcatggtggcacatgcttccagtcccacctacatgggaggctgagccaggagaattgcttgaacctaggaggtagaggttgcaatgagccaaggtcatgccactgcactccagcctggctgacagtgagactctgtctcaaaaaaaaaaaaaaaaggttgggcacggtggctcatgcctataatcccagcactttgggaggccaaggcaggcggatcacgaggtcaggagatcgagaccatcctagttaacatggtgaaaccccatctctagtaaagatacaaaaaattagctgggtatggtggcgggcacctgtagtcccagctacttgggaggctgaggcagaagaatggtgtgaacccaggaggcagagcttgcagtgagccgagatcgtgccactgcactccatccagcctgggcaacagagcaagactccgtctcaaaataaataataataataattaaaaaaatgcagttcaaaagaaaaatatagatttaccattatttttggaaaacaggtttggcaactctatactgactacaccaattcttctcatgccctaagtgggaaaactagcctccacggtagcaaatattgatgtggcactaaggccatttccacctgattaagtggctggctggtcacaaaggccacatcactgaactgagatctcccttctccctatcatcttcctcctgttaatgcaggaatgaccttgaggagaacagcccagaatgagtacaggaattcacaaaacctttagattatttcctctgacaatggcctcaacaatacaatattcatcattatggaagtcctgataattcctgtatctgcatattcatcatatacgtagtgactggatcattgtggatgcccttttaaaagacatgcattacgctgcacgtggtggctcacctgtaatcccaggactttgggaggctgaggccagcagatcacaaggtcaggagttcgagaccagcctggccaacatggtgaaaccccatctctactaaaaatacaaaaattagctgggtgtggtggcatgtgcctgtagtcccagctactcaggaggctgaggcaggagaatcgtttgaacctgggaggcagaggttgccgtgagccaagattatgccactgcactccagcctgggcaacagggtgaggctctgcctcaaaaaaaaagaaaaaaaaagaaaaaaaagacatgagttgcagttacattattctgtctcctccactgcctataaataaagtaattctataaaattataatttcacctgatagcattacaatctgtgatgttatcctacagaattctggatatcagggcatgtgtctgcattgcaagagctgggcaacagacttccctcagccgtaccaagtacaatgcaatatacctcgtaaaagaattttgtcttgttcaaaaaatgccagaaattgtcacaaaaaatgccctgtatccagctgacctatgaacccacaaattttagtatccgtgctacagataaagaccacaaagccctgaaggtcttctctggaggcctctggcagctatgcaaagcagtccacaagtggagaaagctacattctgcattcatactgttccatgagccacaaagtttagctatgccaacaaaagctgtgacccccttcatagtaacaggacctacttatttctgaaccacccatacagtgacaacaaccctcaagattgaagaaggctgaaacaataaggccttcataatagcacaaaccggagaaatgggaggcaagctgttcttaggatcatgacttggagggtagaaaatttgtcaagattgatgtgatacccacaagatctctgaaagacatagtccgtcttttcaagtcaacgtaagaggcctctgggataaaaatgggtaacgtccatggcatgacttatcagacagaaaaaaatgacaaaggaagaagtgctgaagctactcaacaaatccttctgtgactcgatcagaaattaaaagttaaaaaaaaaaaaaaaaaaggccaggcacagtaactcacacctgtaatcccagcatgtttggaggccaaggtggaaggatcgcttgagccaggagtttaagaccagcctgggcaacatggtgagaccctgtctctccaaaacttaaaaaaattagtggagcatggtagtgcatgcctgtggtttcagctactcaggaggccgaggcaacagaatcacttaagcccagatcaagggtgcagtgaaatgtgaacacaccactgcacgccatcctgagcgacacagtgacaacctgtctcaaaaaaaatctagcaaggtacctgggtatagtgaaaaatgcactgtagctgccacacacttggaacttttgcagatgctcaataaatgacattcaatctaggtaggtggcactctcaaagggttacattgaaaaagaaataacattccatatacatctatggtgtttttctcatgtcaatgtttgaggctccaataaaaaggctgaaggctttcttgcattcattacattcaaaaggcatttctgcagtgggaagtctcctgtgtgttatgaagctagatttctacataaatatctcacatgtcacactggtaaggccctgatccagtgttaactctgatcttgaaggagcaaagaggtgtggctacaaaattgcccaaatgtattttatttgtctagtgtgaactctctgatattcaaggagaaaagaccttcaggtaacttttttcccacatttgctgcaatcacaagaccttactccagtgtgaactctcctgtgtttaatgagactgaaagtttcagcaaaggatttcccacattcactgcactcataaggtggtgtgaccagtgtgaactctcttatgaacacagaatgcagagctgtgggtagatgacttcccacaatcactgcattcatatggcctttctccagtgtgaactctctggtgtgcaatgaggtggtccttcttgctaaaaactttctgacaatcctcacactcatatggcttttctccagtgtgaactctggtgtacaaggaggtgagacttcttgttaaataatttcccacatttctcacatttataaggcttttctccagtgtgaactctcttgtgtttagtgagactggagctttcagcaaaagattttccacattcactgcactcataaggcttttctccagtgtgaactcttttgtgttttgtgaaactggagctttcagcgaaagattttccacattcactgcactcataaggcttttctccagtgtgaattcgcttatgaacacagaatgtagagctgtgggtaaatgattttccacaatcattgcattcataaggcctttctccagtgtgaactctctgatgtgcaatgagttggtacttgtttctaaaaaatttctgacaagcttcacaagcatatggcttttctccattgtgaattctctggtgtacaaggaggtgagacttcttcttaaataattttccacattccctacatacataaggtctttctccagtatggccatgctggtgtagaatgaggttacccttgtgactaaaacatttcccacattccccacacttaaaaggtctttctgtagtgtgaactcgctgatgattcctaaggtgtcctttttcattaaaagatttcccacagtctccacacttgtaaggtctttctccagtgtgcatgcgctgatggtgaacaaggctgcgcttatgactaaaagatttcccacattctccacactcataaggcctctctccagtatgaacgcgctgatggctcctaaggtgcccgattgaactaaaagatttcccacattctccacacccataagatctttctctagggtgaactcgctgatgtagaatgagggtgcctttatgactaaaagatttcccacactctccacactcataaagtctgtccccagtgtgaatttgctgatggttcctaagatgtccttttgaactaaatgatttcccacattctccacactcataaggtcttgctccagtgtgaactcgctggtgtagaacgaggttgcccttttgactgaaagatttcccacattctccacactgataaggtctttctccactgtgaactcgctgatggtgaacaaggctgcgcttatgactgaaagatttcacacattctccacacttgaaaggtctttctccggcgtgaactcgttgatggctcctaagatgtccttctgaactaaaagatttcccacattcttcacacccataaggtttttctccagtgtgaaatcgctgatgttgaatgaggctgctcttttgactaaaggatttcccacattctccacattcataatgttttttgtcagtgtgaactctctgatgattactgaagctagcatatttgctaaacgatttcccacattctccacattcataaggtcttttcccagtgtgaactctctgatgattactgaagctaacatatttgctaaaggatttcccacattctccacattcataatgttttttttcagtgtgaactctctgatgattactgaagctagcatatttgctaaacgatttcccacattctccacattcataaggtcttttcccagtgtgaactctctgatgattactgaagctaacatatttgctaaaggatttcccacattctccacattcatgttttttttcagtgtgaactctctgatgattactgaagctaacatatttgctaaaggatttcccacattctccacattcatgttttttttcagtgtgaactctctgatgattactcaagctagcatatttgctaaaggacttcccacattcacagcacacataacactcttctctagtgagcagtctctggtgctgactgagtatatgtttggtgctaaaatgtttcatggattctccacagctgtagtgagctcccccacactgaatgggagacacacactcagttttgctgtttgacttctccccagtgtgactggcctcctgctggagtaatcctgacctgggcaaaaagtccttcccactctcactgaagacagatgactcccctgacacatgcaacttacacctctttgcaaacaacgcctcctcaacactccctctgtagggtttctctccaatgtgctcattctggtgctgatgaaagtttccactgtcatacaatttattcccccaggcctcacacctgtgcagtttctgcttgtgatgtgttccctgatgatctgccacatgcaaaatgtctcccaagatcgggccacacatctcacaggggtgggccttcttgggagacacacctgccataggagtcctgacctgagtctctctttgtatataaatactctgcttagaaggtgccgcctcatcttccactccacaccaacaacctgaaagcaagaaaatgctggtgaagtgcatgttaactctggtgggaaggcacagaccacccacaagtgtatctgaaaaactgaggaattactccaaggaactacttggaggaacaggatgttggcttcaggcggaagatggtgctatgtattattactggactataacggtcacagaatgtaggaggcctcataagttaaaggacacaaccatgtatgtaaaacagggagtacaggcagggtctacaatccctgcatctgcaaaccactcatctgcagaatttatgtcctcatgacatgtgagtgctgtagagagggatttgtccaggccaaggaaaacacaagcacaacacagcagctactcgaggagagtttaacaaagtatatatattcgctaacacaaatctctatgccaacactggagagaacactgtagatggtgacgtatgtaaatggatgagatctggggcccagagatatgaagattagataggagaatggacattagggtacaagttcatgtacaagtgggtcaaaagttaaaaaagaaagagtagaagcgataaggtagacaagtgtgatgctctcaagaatgaggaagaaaagacaaattatgtgtgcctacttgccttgccacaaaactactactaaaatagaacaggttgttggtatgctttcaataaagccctgactccatgacctcctccagggtgccgctttttttttttttttttttttttttttttttttttgagatggagtctcgctctgtcacccaggctggagtgcagtggtgcgatctgggctcaccgcaacctcccctcctgggttcaagcaattctctgcctcagcctcccgagtcactgggattacaggcatgtaccaccaggcctgactactttttgtattttagtagagacagggtttcaccatcttggccaggctggtcttgaactcctgacctcatgatccacctgccagggcctcccaaagtgctgggattacaggagtgagccaccatccccagcccagggtgccactctttagggactcactccttctgagcctattatgctgaggctgaattcatttgcatcttctggatcaaatggaggactgtgcctcccaccacaatgatgaccaaatacatgggacatgaatgatgcacagactaagggaaagacagaacaagggaacagccaacattgtctcagaacaactcagcccatgacagcccatgagagaaaaaaactgagtatttcaaggagaatttctaaagaaggtcttgcaagaacagcctctggtctatataggcagtgatgtagtctgtgaaggcaattcctgccacaggaaggcataagaaaatagcagctagagaaaggaagtagactgtgggtacacaggaacctgaaatctggacaaggacacccaaacatccacaggactaacaaggtgggcttctgactgggaatccctccctgggagcctgcagtaaagcaggtgttggggctgctccaagaaaggagtagggcagtatgtacacctcagacctaccaaccaagaacctacccacagaactgaagcaggaagctgtgtccatgctcctgacatgagaaagtcttaccaatggggaaagataggggaaaacagagactagctcaggtcacagggtgagtgtgagcaacttacccagggaggatataagtgccaggttctccagcgtcacatcacggtacaggcatctctgagcctcactaaggagattccattcctcccaggtaaagttcacagccacatcttcaaaagtcactgtgccctgttatgatgttgacagatgaaactacaaactgcccctatgctgaggtatcacaatccatctctcccacacatctactctcgcacatcctcctctcaaggtcctcaaacataggagaaactaggcccactggtcatggggtatagccaccaacaatagttgaacaaataggtatctgtgtggtggttgtgacgtaagagtccaccccctcctgacaggcactttccctagtatggccaaggtcatggaaagcccaatgtggcaccttcagcacagcagagataccctctctgaacacacctcattctttagacttccaggtacattccatgtccatccccaggtgactgccacacaccactggcctctctctggcctttaaacaacttaaagtatatttttttgtttgtttgtttgtttgagacagagtctcactctgtcaccaggctgaatgtagtggcatgatctcggctcactgcaacctccacctcctgggttcaagcaattatcctgcctcagcctcccgagcagctgggattacaggcatgtaccaccacacctggctaatttttgtatttttagtagtgataggatttcaccatgttggccaagctggtctcgaactcctgacctcgtaatcctcccacctcggcctcccaaagtgctaaaactacaggcatgaggcaccgcgcccagccagcttaaagtatcttaattccctcctttttcttcaactagtgtgggttgatatctacccctagggctataatgttggtaaaacaaattacatctgatattctacacatgtcatcaagagcaatctacaaatcaattgtattgagccaggcgcggtggctcacatttgtaatcccagtgatttcagaggccgagccaggtggattgcctgaggtccggagtttcagaccagcctggttaacaatgtgcaacttcggctctactaaaaatacaaaaaattagctgagcgtggtgtcgggcgcctgtgatcccagctacttgggaggctgaggcaggagaatcgcttgaacccaggaggcagaagttgcagtgagccgagattgcgccgttgcactctagcctgggcaacaagagcaaaactctgtctcaaaaaaaaaaaaaaaaaaaaaatcaaatatattaacagcctgataagagggacaccactcaccacagagagccacatgggggttgcattgtggataagagagagcaaccatggccatggcatgcaagctttgtaagatgaagagagtgtaatggcctgattccctcaggaggatgccattgacttatttgaataactctggacataaaaatggaattgaaactcactacaaactataacaggaactctgcctggtcccattgatcgaaaggcttcagaggctaggatacattacctttttttttttttttttgtgatggagtctcactctgtcaccaggctcgagtggggtggtgcaatctcggctcactgcaacctccgcctcctgggttcaagcaattctcctgcctcagctcctcagtagctgggattacaggcatgtaccaccatgcccagctaatttctatatttttaatagagatggcgtttcaccatattgggcaggctgctttcaaacccctgatgtcaaatgatccacccgcctcagcctactaaagtgccgggattacaggcgtgagccgctgcacctgttcagatatattacttaagagtgtgaagtggccagtcatggtgtctcacacctgtaatcccagcactctgggaggccaaagtgtaaggactgcttgattccaggagttcaagagcagcctggacaacacagcaaggtctttttctacatacatgcacacacacacacgcacacatacacatgcacacaagggaaaaaaatttaaaatatataaaaagagagttaaatgggaaagaaacttgcactcaggccatttgtggttataccaatatgaccaggcatccaggtggcaaatcacactgggccttaatttttggccttacactacatcgtagctgacaccatccagagtgtatggcccattcaaaccgatccaatattaccacagaactgcaattctattggatcctaaaaggagcggtggtctcaagtaattctgtgaggacctccttgcatggctccacagaaacacagaaccatgtgtggcttcagctatccatgaccctattccacttctgtgctacacttgccagcccctcagcaatgatgacctttccctcaattacttctgtacttctgcctgcatctcatctctattatctccatggaagtctgccccacgacaagctatgccctctgatacaccctacattcattgtcacttacctccctctcctgtgtgaatgcataacacaggttatgaatgccaataatgtccgccagggacccaggcaaaacatctagtcctcagcctccaaccagtcctttctggttccctaaaagatttactaccttattatgaagtgtgccctccaaaatgggacccatggctaacgcaccttagtccacacattagctatcatatactggatgtctccaatatcaattccttcccagatatcccgacctatgtggacaagcatctcagggtctgagcatggtgaaaacaaccctccttatattcccagtgactatattatgcctactcccaacttgctcatctcagctgatacagcttctatcactgctgctgctaaggccaaaaaccctagggttgccaggcacggtggctcgagtctgtaatcccagcactttggaaggctgaggtgggtggatcacctgaggtcaggagttcaagaccagcctgaccaatacggtgaaaaactctgtctctactaaaattacaaaaattagccgggcgtgatgccgtgtgcctcctgtggtcccagctactcaggaggctgaggcaggagaattgcttgaacctgggaggcagaggttgcagtgagcagagatcatgctactgcactccagcctggtgacagaacaagactccacctaaaaaaaaaaaaaagcaaaaacaaaaaacccccagcgtcatacctgaaaccctcttgcatgtccttaccgaccgcattagaaaatctagctgctcctttaccaaatgtaaatcacaattctagcgacatctccttggccaacaatcatccattaaacctcacctggatgacagaatgagcctcaacgctgtcttccttcctcctcccttaaccccatgttcctttctccaatgtggagccaggcagagaagtaacatcacctccccactctgatcagttttatctctgagcatttcacatactgctaccaaatccaaggctgaccttctaagtgtttacacagtttcactgaaatgggaatacctccataccacctgcgttatggacttagggcctagggtttagggtttctctagtgtttccggttgaaaggactgagctcgagaggtgcaacagagcaggatggcggaatagaaagctgcacccatcatacccttaacagaacaccttttttttttctttttttttttaagagagagtctcgctctgtcaccagggctggagtccagtagtgctaccttggctcactgcaacctctgcctccggggttcaagcaattctccctaattctccctgcctcagcctcccaagtagctgggattacaggcacctgccaccacactcgactaatttttgtatttttagtagagacacggttttgccatgttggccaggctggtctcaaattcctgacttcagttgatccgcctgcctcagcctcccaaagtgctgggattacaggcgtgagccaccacacccggcccagaacaccaaatttaaacactgtcaacacagaaaaaaatcacctttgtaagaaccaaaaatcaaatgagcactcacagtacctggatttaattttgtattactggaaatggcactaaaaggggctgtagagtcttgagttgccaatgccactcctccccatcccccagcagtgcctgcctgttgtggagaatctgtgctcctgggaagggaaagcgcagtgactgtcagacgttgcacagaactcagtgcttccctgtcatagcagaaagcaaaactgggctgaactcaacggacgcctacccagggagtaagcatagcgaccagcccagccagaggggaatcgcccaccccaatggtcaggacttgagatctggcaagccttgccactgtgggctggagggctctgaagtcctaaataaacttgaaaggcggtcgaggccacaaggactgcaacccctaggcatgtcctgtgctgagctgggctccgagccaggggacctggttgggttgggggagcacaacctactgagacaccagttgaggtagctaagggtgtgcttgtgccacccctcatgcaaccccaggctacgtggctccttccttccactcgaggagaggagagggaacagcaaaaagaactttgtcttgcattttggatgtcacctcagccacaggatagggcactgggcagggttgtgaggacccattccaggcccacccagataatatttctagacacactctggaccaaaacagaacctgctgccttgaagggaagaattcagtcatgggaggacccatcaccttctgactaaacaacccttggaccctgaataactagcagcagtacccaggtagtatgcgatggcactgggtgagactctgagacatgccagcttcagatgtaacacagcacactgctagctgtggtggttacggtcagagaccccacctgcttgagaataacagaggaaaaagtaaaggggaccttgtcttgcacctcagctgccagctcaaccacagagggatagagcaccaagaagcctcttggggtccctgattccaggccttggctcgtggatgacattgctggacctgccctgggtgagtcttgaagagtcagcctcagaccaggcaacattcaccacaagctgactgaagagctcttagcccttaatggaacctcagtggtagtctgacagcactccctgtgggcccgtgctggtggtggccacagagtgaggctgctctgcctgtggaaaggggatggaagagtgggaagggctctagcttgtagtttgagtgccagctcagctgcagtgcaaaggaacaccaggtagatttctaaggatttttactccaatccctggctcatggatggcatctgtataccaacctgaggcctggggaactcaccgtcctaaggagaaggacataagcctgtctggctttgccacctgctgactgtaccgggctagggccttgagggaacacaggcgatagccatgtagtggtcacaggagccttgggtgaaacccagtgctgtgctggcttcagctctcacccagcacagtcccagtggtggtagctaaaggggtgcttctgtcccaacccccagtttcaggcacttcagcactgacagagacatgctgggacaaagtgagggaagacccaacaagagtctctacctgttatgttaatcaagggaaatatttcagatcttattcaagaccacaaaggtggtatagctctctgagtctgcaagagtcacagcattactgagtgtggggttcccgctgaagtagattcagcttagatcacaacacccgggtcctttcaaatacctggaaactcttcctaagaaggacaggtacaaatgagcccagactgtgaagaccacaataaacacctaactgtttaatgcccagacactgatgaacatctacaagcatcaacaccatccaggaaaacgtgacctcaccaaacaaactaaataaagcaccaaagacgaatcctggagaaacagagatacatgacctttcagacagataattcaagatagctattttgaggaatttctcaagacaaacacggagaaagaattcagaattctatcagataaatttggcaaagaaattaaaataattaaacagaactggccgggtgtggtggctcacacctgtaatcccagcactttgggaggccgaggcgggcagatcacaaattcaggagatcgagaccatcctggctaatggggtgaaaccccatctgtactaaaaatacaaaaaattagccaggtgaggtggcgggcacctgtagtcccagctacacgggaggctgaggcaggagaatggcatgaaccccaggggggcagagcctacagtgagctgagatcacgccactgcactctagcctgggcgacagcgagactccatctcaaaaaaaaaaaaaaaatagaactggccaggcatgatggctcatgcctgtaatcccagcactttgggaggccaaggcggatggatcatgaggtcaagagatcgagactattctggccaatatagtggaaccccgtttctactaaaaatacaaaaattagccggatgtggtagtgcacacctgtagtcccacctactcgggaggctgaggcaggagaatcgcttgaacctgggaggcggaggctgcactgagctgagatcgcaccactgcactgcagcctgggtgacagagagagaccctgtctcaaaaaaaaaaaaaaaatcaaaatggattaaaaaagacttaaatctaaaacctaaaactatgaaactactaccaaaaaagactgaagtgggcaaagatttctttatttttttttttgagatgaagtctcactctgttgcccaggctggagcgcaatggcacaatctcggctcactgcaacctccacctcccaggttcaagtgattctcctgcctcagcttccgagtagctgtgattacaggcatgtaccaccacacccagctaatttttgtatttttagtagagatggggtttccccatgttgcccaggctggtctcaaactcctgacctcaggtgatctgcccgccttggcctcccaaagtgctgggattataggcgtgagtcaccgagcctggccgacaaagacttcttgagtaatacctttcaagcacaggcaaccaaagcaaaattggactaatggcatcagatcaagttaaaaagcttctgtacagcaaagaaaacaatcaacaaagtgaagagataacccacagaatgggagaaaatatctgcaaactacccatctgcaaagggattaattaccagaatatatagagttcaaacaactctataggaaaaacccttaataatcccatttaaaaatctcaatagacatttctcaaaagaagacatacagtcaggagcagtgcctcccagctataatcatagcagtttgggagactgaggcagaaagaccacttgagcctaggagtttataaccaccctgtttaaccagtgagacccccatctctacaaaaaagtttaaaagctagccaaggcaaggtggcacatgcctgtggtggtccctgccacttgggagactgaggtagcaggatagcctgagcccaggtggtcgaagctgcagtgagccatcatcacactacagcattccagcctgggtgacagagcaagatcctgtctcaaaaatacaaacaaaagacaatgacatacaaatggcaaacaggtataggaaaaggtgctcaacatcactggtcataagagaatgcacatcatctcaccccattaaaatggcttatttatatccaaaagacaggcaataacaaatgctggtgaggatgtgaagaaaaaggacctctcgtacactgttggtgggaatggaaattagtacaaccactatggagaacagtttgggggttccttaaaaaactaaacattaagctagcatataatccagcaatcccactgctgggtataaaccaaaaggaatccagtatatcacagagatatctgcactcccatgtttgctgcagcactgttcacagcagctaagacttggaagtgacctaagtggtcatcaacagataaatggataaagaaaatgtaggccggacgcagtggctcacacctgtaatcccagcactttgggaggacgaggccggtggatcaggaggtcaggagatggagaccatcctggctaacacagtgaaatcccaatctctactaaaaatacaaaaaattacccaggtgtggtggcacacgtgtttagtctcagctacttgggaggctgagacatgagaatcgcttgaacccaggaggcggaggttgcagtgagccatgatcgcaccactgcactccagcctgggcaacagagaaggactccgtctcaaaaaaaaaaaaagaaaagaaaatgtgagggcgcggtggtggctcacacctgtaatctcagcacttcgggaggctgaggtgggtggatcatgaggtcaggagttcaaaaccagcctggccaagatggtgaaaccccatctctactataaactacaaaaattagccagccgcaatggcaggcacatgtaatcccagctactccagaggctgaggcaggagaatcgcgtgaatctgggcagcagaggttgcagtgagccgagattgcaccactgcactacagcctggacaacagagtaagactgtgtctcaaaaaaaaaaaaaacaaaaaacaaagaataagatctagaaaaagagaataagatctagaaaaagagaataagacctagaaaaagagaataagatctagtatttagtagcacaacagggtgactacagtaaaaacaacctaattgtacatttttaaataacaaaaagagtataattggattgtttgaaacacaaaggataatgcttgaggtgacggatacattaaccctagtatgattattacccactgcttgcctgtatcaaaatatctcctgtaggcggaggttgtggtgagctgtgatcacgccactgcactccagtctggatgacagagtgagactccttctcaaaaaaaaaaaaacaaaaaaacaaaataactcctgtaactcataaatacatacacctattatatacccacaaaaatttaaaatttaaaaaagaaaatatttttaaaaataaaaaataaagagtcccacaacaccacaagctagagaacatataggtcggggtcagtaccagtgagggaatggaacactctccacttccttatctgagttcctaaaatgcttctaagtgcttggaggagaggcagacattacaggaatgtgtccctgataggatgtgataagctcagacctccaggtacccctccttggccctggagtcaggtgacctcagactgcttgtctgacctgcatgcctcaatgtaaaatgtcatctctgccacctatgtgatctacaacaaagattcaacctcccagggccccacggtgctcatcacttctctccactctgttcttcctttgattggccttcggaaaacctttaaaatccagattttgatcctgtcctttgtatagagcacacttgacataactaactccatcttagaaaaagacaatttgtatttcacagggcactctgccatcaagggtaagatgctttgtttaataaacaaaaaaaaaagacggccaggcacggtggttcacgcctataatcccagcactttcggaggccgaggcgagcggattgcctgagcttgggagttcaaaagcagcctaggcaacatggcgaaaccccatctctactaaaaatacaaaaaattagccaggtgtggtggcgggtgcctgtaatcccagctactcgggaggctgaaacaagagaatctcttgaacccgggaggcggaggttgcagtgagctgagatcacaccactgcactccaggctgggtgacagactgagacgctgtctcagtaaaataaataaataaataaaataggctgagtgtggtggcttatgcctgtaatcctagcaagttgggaggctgaggcgggcggatcagttgaagtcgggagtttgagaccagcctgaccaacatggagaaaccccgtctctactaaacatacaaaaaattagccgggtgtggtggcgcatgcctgtaatcccagctactgggaggctgaggcaggagaatcgcttgaacccgggaggcagagattgcagtgagccgagatcacaccattgtactcctgcctgggcaacaagagcgaaactccgtctcaagaaaacaaaacaaaataaaaaataaagactacatctaaccaggtaaggtcacaaacaaggaaactcttccactatcagttctcaccagagtattctgtaactgtaaaagattaggccttcagcagctcaaaactcagcatctgctgcctaaggctctgccacctcaaagactcttccttgtaagactgcaggccaattgcccaccaactggcccagaccaagatgccttttgtcttccttgctccctctaaactggttccataacgtttgctcctatatctttttcctcttgatgctaagcattattttgttccttgtgttgtaatgcccaaccttgttttcactaatcctgtttttagactctcccttttgctctcttaatcacctagcctcgtttccacatgaatagactctcgcttagctgagaaagccagacgagctccacctggcccccttgatttacaagacattaaggactccttacccacccccctttcctcaaggagttaacttgtgtaagcagattctcaacatatcaaaggagtccaattaactgataagggactgggaacaaaccatgtatgaagttcccaggattttgctcaaaagataacaccataaagccttgagtttgtgtctggcgtagtgcccatatctaactcttatgaaggatttagagcgccacacctggtaccttgcctttttgtaaccatttgtcttttaaattgtttgtttctctgtaaccatttatccttttaattttttgcatgtttttacttctgaagagttgttgcatttaagctcccctccccttcctaaaccaaagtataaaagttaatcaagccccttcctcggggccgagagaattttgagcgttagccgtctctttggccgccagctgaataaaggactcttaattcgtctcaaagtgtggcgtttttctaactcgcccgggtacaacagtgttatgtttaacctttaacatttacatgttaagtatactattgtgtattgtttgctatattgactgacttggggagtgtcttcagcctctgtgcccatggccaactaccaagtgaactggaatcacaagagaattgcctccttcgaactccatttagctcatggcttttgttgactcaaatatcacctgacactgtgcaaagacacaaacatgcatggacctgattatctctacccttacaatgctcatgacatccctcctttcttcgaaaatctccatgccttctagggtcctcacgtgagttcatagcccccagcctgcttgctcttccaggaggagctccgcctcataatttgctcccaacaggcacctgtggaccccagattccatccttctggctcagttcacttccaggcctttgcccgcgccagtccctgtacctgccggtctccccaccgcatcccacgggtgtcagaaatggggcccctcccgcaagcgcctcagtgtcccaacgccggcgtccgggctgcagagccgtgaacaggcgctgctacctcgctgcttttgggtgacgatgaggtgacctgaggacacagaaggccccacaattacctgagcggagagcctcagcgtagccgcggcagccatcgaaccacgtggttttaagcagagtcgggaggatagggcgaccagccaggagatatgggcacgacggtccgtatcctggcccaggagtgggtcacgctgggcgccgtcacagagctccagagtagcctctgtgcagcggaggacaactgctccccgacttctgggttcagtcaccacagtgcggacctagcgctcaggagcctctcctacaaataaatccaacaccaatcaaaatggccgccaccagagggcgccggaagtccggacccattgtcacgtgcacacaggaaacgcctttattctgagccctcagaggtcttctacgctatcattcgaggctgagttttctgggtaatgtagttccctaggcaacaaggagggtaaagggcgcaattcccagaggcgcttctgcaggaaaagcccagcttcacctcgggagtatccttaagatgtgcgtcctgactggtatggtggctcccgcctgtaattccaccagtttgggaggccaagtcacaaggatcatttgaggtcaggagttagaaattagcctgagcaacaaagcaaaatcctgtctctacaaaaaataaaaaatattagcggagtgtggtcgggcgggcctgtggtcccagctgccctaaggttggggttagggttagggagcctgaggagggagaatcgcttgagctcaggagttcgaagctgctgtaagccgagatcgtaccactgcattccagcctgggcaacagaacgagacctcttatctaaaaaataaaaataagggccaggtgcgggcggctcacgcccgtaatcccagcactttgggaggccgaggcaggtggaacacctgaggtcaggagttcaagactggcctggccaacatggtgaaaccccgcctctactaaaaatacaaaaattaacccacatggtgacatgcgcctgtaatcccagctactggggaggccgaggcaggagaatctcttgtacatgggagtcagaggttgcggtgagtgagatcctgccactgcactccagcctgggtgacacagcaagactccatgttggaaaaaaaaataaaaataaaaataaaaaaataaataaaagattgcagatctttctcctaggcagaggatcatcctgcctctccttagaactcacattgagatttcttggggttattggctgtaactgattaccctagtgtatggaaaaatattatttcagagttagtgtagatgttcccaaaggctacagatccaaattcacctatcatttcagatggtccttcagatgcaaaattcttccactggaagcaaagattaatgcaaagattaataaccattattgtattgttaaaatgaacgtgtaaacacccagagggttcatttttcctactgcccagataaagccaatttatcaggacagggaaattgcaaaagaaaaagagttttattcacacagagttggatgaacagcatactggagtcttactagtattactcaaatcagtctccctgaaaattgcgagactggggttttttgttgttgttgttgtttatttgtttgtttgttttctgagacagaattttgctcctgttgcccaggctgaagtgcaatgtcacgatctcagctcactgcaacctccgcctcctgagactggggttttttaaggataatttggtagatagggggccatgaattggggaatgctgattggttgggttggagatgaaatcatagggagtcaaagttgttctcttgtgctgagtgggttctgggggagagggaggcacaagaccagataagccagtttacccatctgagtggtgccatcagatccatcaagttcagggtctgaaaaatatctccagcaccaatcttagcttttgcaatggtgataccatccctaggaacaactggggatgtttacagtcttgtggcccctggctgcatgactcctaaatgataatttctaatctatggggccctaataaatcagtaagttaacaggaattgggaaggagccaagctggcagaacaagaacctaaccccatctgcaacctctttgtgggaagaaaccacagctgtcagaagtgtttaacagagcaactccgtcttgaataggggttggataaaatgaggctgagctgcattcccagacagtgaagacattctaagtcacaggatgagataggaggtcagcacaagatacaggccataaagacgttgctgataaaacagtttgcagtaaagaagccggctaaaacccaccaaaaccaagatggccatgagagtgacctctggtcgtcctcactgcaacactcccatcagtgccatgacagtttacaaatgccatggcaacatcaggaagttatcctatatggtctaaaaaaaggaggcatgaataatccaccctttgtttaggatataatcaagaaataggggccaggcgcggtggctcacgcctgtaatcccagcactttgggaggctgaggtgggtggatcacaaggtcaggagatcgagaccatcctggctaacacggtgaaatcctgtctctactaaaaatacaaaaaattagctgggcgtggtggcgggtgcctgtagtcccagctacttgggaggctgaggtaggggaacggcgtgaacccgggaggtggagcttgcagtgagccgagattgcaccactgcactccagcctgggtgacagagtgagactccgcctcaaaaaaaaaaaaaaatcaagaaataaccataaaaatgggcagccatgccaggcatggtggctcacccctggaatcccagcactttgggagaccaaggtgggaggatcatgagatcaggagatggagaccatcctggctaacaacagggtgaaacccaatctctactaaaaatacgaaaaaattagccgggcggctctgtctatggagtacccactcttttattcctttactttcttttcttttttttgagcaggagttttgctctgtcacccaggctggagtgcagtggcatgatctcagctcactgcaacctccacctcctgggttcgagcaattcttctgcctcagcatcctgagtacctgggactacaggtgcgcaccactatgcccggctaacttttgtatttttagtataaacacggtttcactatgttggccaggctggtttcaagctcccaaccttgtgatctgcccacctcagcctcccaaagtgttgggattacaggcgtgagccactgcacccggcccagaccaatgtatttctttaatgtatttgattgatgtctcttgcctccttaaaatgtataaaaccaagctgcgccctgaccaccctgggcacatgttctcaggacctcttgagggctgtgtcacaggccatggtcactcatatttggctcagaataaatctcttcacatagtctacagagtttgactcttttcattgacactgaagaaacccccaacccagaggaaaatcatctgtgtgcaccacttggctcactttgagtgagtggggtgcatatacccagataaagaatgagattggtttacaggcccaacttggtggagttagagtctctcctggttaaaggctcctctcaataaaaggcaaggacacttgaccaaactttggttcaatgcccaaattaggaagattagattacttcctaagagttagggggttagaggcccctctcagtaaagtccctcttggctaggaatgggtttggcacaatgggctgttaactgctgttctctttggaataatctgccttgctgatggctatgggtgacaggactaggaatgtacaggatcatgggacatggggagctttttcctccccaaaagggaaaacttgcgagctgatgggactgctggaaaagatccccttgctactgacaagcagccacctgaacttttcagtgtcactgcaatgggagtggggggggcttctctggcctctctaagctcctggccttccccaccctgccacaggcaatgtttttctctgtctcctttccctttcttatcttttctgttattcagggtgaccatcttgcccagagaccaagttgaaactcatggtcggaggttggattaaagatgatggggcccaaccagggcaagtttgagccttgcctgttagatattccaggcggagccgagtggctaatgtgtatgttttgtcacacgtattttgctctggccagaatggaaaaagataatttagctttgtattgcagattggcccccaagggtgtggtgcagccagctgggtcactagaggctctcagggaaaggcaaaccagaagcctggaatgctggaatgccagcaaaagggtaagaatttcttttttgttattgattttttttttttttttttttggagacggagtcttgcactgtcgcccaggctggagtgcagtggtgtgatttcggctcactgcaacctccgcctcctgggttcaaacgattctcttgcctcagcctcctgagtaggtgggattacaggcacgcaccaccatgcctagttaatttttgtatttttactacagacaaggtttcaccatgttggccaggctggtctccaactcttgacttcaggtgatctgcccgcctgggccccccaaagtgctggaattacaggcatgagccactgcacccagcaagaatttcctaccagtcagttggctgggtgtggtggctcacacctgtaatcccagcactttgggaggcagaggcaggtggatcacctgaggtcaggagttcgacaacagcctgaccaacatggtgaaacaacatctctactaaaaatacaaaaaattagtcatggccgggtgcgggggctcatgcctgtaatcccagctctttgggaggccgaggtgggcagatcacttgaggccaggagttcgagaccaacctggccaacatggtaaaaccccgtctctactaaaaattgaaaaaataagccgggtgtggtggtgcatgcatgtaatcccagctactcgggaggctgaggcaggagaatcacttaaacctgggaggtggagattgtagtgagctgagattgcaccattgcactccagcgtgggtggcagagagagaccccatctcaaaaaaaaaaaaaaattagtcgtgcatgttggtgtgcacctgtaatcccagcttctcgggaggctgaggcaggaaatcacttgaacccaggaggtggaggttacagtgagctgagatggtgccactgcactccagcctgggtgacagagcgagactctgtctcgaaaaaaaaaaaagtccaggtgcagtggctcatgcctgtaaccccagcactttgggctgaagtgaggggatcacgaggttaagagctcaagactatcctggccagcatggtgaaaccccgtctctactaaaaatacaaaaattagctggacatggtggctgtagtcccagctgctcaggaggctgaggctggagaattgcttgaacccaggaggtgggggttgcagggagctgagatcatgccactgcactccagcctggcaacagagtgagactccatctcaaaaaaaaaaaaaagaagccgatttgcccaaatcaaagaaagaaaagaagtgggttttcttattttgtttcattttgtttttagtctgtaaatgaaacaaaacagcaaggagaaaagtcccctgatttgtatcctagtgcttcttgatcacacctagttggcatagctgcaaaaagcatagccggctgggtgcagtggctcacacctgtaatcccagcactttgggaggctgagacgggcagatcacgaggtcaggagatccagaccatcctggctaacacggtgaaaccccgtctctactaaaaatacaaaaaaaaaaattagccgggcgtggtggcgggtgcctgtagtcccagctacttgggaggctgaggcaggagaatggcatgaacctgggaggtggagcttgcagtgagccgagattgcaccactgcactctagcctgggcaacagagcgagactccgtctcagaaaaaaaaaaaaaaaatcatagccacatctatctaatcttattgctcatagctgttaaataccaaacctgaatacgcaattttagaaacggagccttcaatgctttttgttcccaatgtttcacaagcaaatggatggaaatcagaaggcacacaggggaagagtataataaaagccctaagacaagttaaatgaagtcccctgaaaatgacagtgaagcagagcaaccaagagattgattcatacagcaaagaggacaagacagattaatgcaaagttgacatcctgtggtgccaaaccagttcttagccaagagggactttactgagaggggcctctaactcttaggaaggactaaatcttaggaaggactctaaccttcctaaattgggcctcaaacccagggtcagtcaagcctccttgccttttcttttcttttctttcttttttttttttttgagatgaagtctcactctgttgcccaggctggagtgcagtggtgcgatctcggctcactgcaacctctgcctcctgggttgaagcaattctcttgcctcagcctccctagtagctgggattacaggtgtgtgccaccacacctggctgatttgtgtatttttagtagagatgggttttcaccatgttggccaggctggtctcgaactcctggtctcaggcaatccgcccgcctcggcctcccaaagtgctgaaattacaggtgtgagtcaccgcacctggccacgtccttgccttttattgagaggaaactttaaccctctctgtcttaggagagactctaactccctaagctgggcctctaacccaatctcatcctttacccaggtgccccaccacttacccaaagtcggccaattagtgctgcagcctatttcctttgggccggtgggtttcttcagtatcatcccttcaaggttcaccagaaagatgttaccagaaagggcgtcccaattcagaccccaagagagggttctttggatctcacacaagaaagaattcagggtgagtccacagtgcaaagaaaagtaaatttgttaagagagtaaagtgatgacagaatagccactccatagacagagcaggctcttcccgaaagtcagaggaggaatgcgtccaccctaggtacttgtttatacatagtgtcaggaataacgctcaaaattttaaggaaattgaacactcgaacaaacgatttttagcaaagaaattttacgtttgcacagaggggtgcctctttggccagtcgccatgagagcgcacctgaaaaaaggggcacgagagcctttgagcgagccacttttgtgagcgagactccatctcaaaaaaaaaaaaaaaaaaagaattggcagagattttaaaaaggcttataaagaaggagccaaaattccagtttctgattggttggtgtgggcattgataaaggctgctcttgagccatttcaaacagatcacgagacagattcagatgaggaagacaagtgtgtaaaaaactaacttcagattctgaatgcgaggagcaaaaaccagaggaaattaagaaagggaaactgaaaagggtatgttttactaacccatcagctccacctgctgaattaagtgaatggccacctcctttccctccccataatgggcgagaaaatgaattagctgtaaaatttactgctcctgtagttgcaacattaaaatctggagcaattggtggtgctatacaaaattctattcaaaaggctagagctgagggagaccttgaagcatggcaatttcctgttactatcacccagcaaggagggaaaaatatagctagttgggccacattttcttttaagctattaatggaatttaagcaagccattagtcaatatgggccaaattctccttttgtacaaactttactaaaaaatgtggctctgaataatagattgataaaatatgactgggatactttaacaaaatctgttctcactctatctcagtacttacagtttaaaacccggtgggctgatgaagctcaaactcaggcaagggaaaaaacacaagcacagccatctgtgcctgtttcctttcaacagttaaagggagtcagtcctaattggggtcaattagaaaatcaagcagtaatggagaatgttgccattgttcagttatgcactgtgtgcttacgggcatgtgacagaataaatgttacaggagaaaaatatccttttttcagttctgtctgacaaggacctaaagaaccatatactgattttattgctcagctccaggaggctgtgaataaggccataactgacaaaacagctcaagatgttgtaatacagcttcttacatatgaaaatgctaatacagagtgtcaaaatgctattagacctatgagagggaaggctcatttggctgaatatattaaggctggtgatggcattgggggtaacttacacaaggctactcttttagctcaagctatggctggattaaaggtgggaaaaatacgccccatttttcaggctcttgctttaattgtgggcaatttggacacacaaaaaaggaatgtagaaaaggaaatcaaaaggcaaaactattaccatcaatcaacagaaaagtcccgatgtatacccccggtataagaaaggcaatccctggacaagacagtgtcattctaaatttagtaaagatggacaacctcttttgggaaaagggaagaggggcacacctcaggcccctcaacaaaccaaggcatatccgcacagtcagtgcccttacaaacgtacaacaattgtcccccgccacagcaggcagtgctgccatgtatctctgcagcacaattcccactccctacttcctggggagccaccaaagaaggtccccatgggtgttaggggccctttaccctcagaaaaagttggtctattgcttggagggtctagcttaaatttaaaaggtgtcactgtacatagaggaataattgattctaattatgccagagagattcaactagttgttagttcctcaactctgtggtctgtttccccaggaaaaagaattgctcagttgttgctgttaccttatacaaaactgggaaacagcactgtaaaaagaacaggaggctttggtagtactaactcagcagggaaagctgtatatttggttaattgaatgtctgataagagacctatttgtacagtaaccatccaaggaaaggactttgaagggttagtagatactggagctgatgtttctattattgctttaaatcaatggccctgacactggcccaaacaaaaggcatccattggtattgttggagtaggagctgcttcagaagtttttcaaagttccttaattttgccatgtctagggctggatggccaagaagggacgattcaacctattattacagctattcctgtcaatttatggggaaggggcatattgcaacaatggggtgctgaaatatctattcctatggatcagtatagtaataacagtaaacaaatgatgagaaaagtgggatatctcccaggaaaaggattaggaaagaatgaaagtgaccaaccagaacctttagaactaaaagggcgaacagatcgaaccgcattagggtatcatttttaggagcggctattgctgagcctccagctcccattcctcttgtttggttaactgccaaaccagtttgggtggagcaatggccgctgaaacaggaaaaaactggaggctttaaaagaattagtacaggaacaattgcaaaagggacacatagagcctactttctctccttggaattctcctgtttgttattaagaaaaaaatcagacggacgcggtggctcacgcctgtaatcccagaacttgggaggccgaggcgggtggatggcaaggtcaagagattgagactatcctggctaacacagtgaaaccctgtctctactaaaaatacaaacattagccgggtgtggcggcatgtgcctgtagtcccagctgctggggaggctgaggcaggagaatggctgaaccagggaggcggagcttacagtgagctgagatcgtgccactgcactccagcctgggtgacagggccagactctgtctcaaaaaaaaaaaaaaaaaagaaaagaaaaaatcaggtaactggagaatgttaacagatttaagggctgttaatgctgtaattcaacccatgggctcactgcaaccagggctgccctctccaacaatgattccaaaatactggcctctaatattgcttatttaccattcctttagctacccaagattatgaaaaatttgcttttactgttcccgctataaataacaaagaatcagcggataccattggaaagtactcccacaaggcatgttaagtagtccaactatttgtcaaacttatgttggaaaagctattaagccagttagagaacaatttaaaaaatgttatattatcaattacatggatgatattttatgtgcagctgacactagggaggaattaacactatgccacaaacagaaaagtctgtaactgctgcaggactaatcatagccccccataaaatccaaacttctactccctttcaatatttaggaatgaaggtagaacaaagtgctactaagtctcgaaaggttcaaattcaaagagataatttaaaaactttaaatgactttcaaaaattattaggagacattaattggatttgtccaactttaggcattcctacctatgctatgtctcaccttttttctgccttacaaggtgattctaacttaaacagtaaatgctccctgtccaaagaggcattaggggaacttcaattacttgaagaaaaaattcaacaagcacaagtgaaacgaattaaccctatgcagccattacagtttttagtttttcctactaaacattcacctacaggagttattgttcaacagaatgatctggtgaagtggctttttctacctcacaatacaaccaaaacgcttactctgtattcagatcaaattgctgtactaataggacaagcaaggctgcacacaacaaagttaatgggatatgatccaaatcaaattacagttccagtaaacaaacaacaaattcagcaaacttacattaattcccaggaatggcaagttaatttggcaggttttgttggcattcttgataatcattatcctaaatctaagatatttccatttctaaaattaacatcctggatattgccttctattactcaaaaagcccctaatgaaggggccattactgtttttactgatgggtctagtaatggataagcctcatttgtgggacctcaacaacaagtttttcaaactgactttgcttctgctcaaagggctgaacttattgctgtaattacagtactgaaaactttaaaaaagccagttaatattgtttctgattcagcttatgtggtgcaaatcacacaaaatattgatgaacaacttaatcttttatttcattctttacaacaagcagtacaacaaagacattcccctttctatattactcatatgagagcacatactaacctccctggtccttttaacttaatcaaagggcggatgcactggtttctgcagcttttgccgatgcacaaacgttccattccttaacccatcttaatgctgcaggcctcagaaaaagatacggcttatcctggaagcaggttaaggagattgtaaaacacttttctgccggtgaagtcctgcatctgccacatcagggagcaggagttaaccctagaggtctatctccaaattccatctgtcagatggacataacacacattcccacttttggaaaattgtcctttgttcatgtttcagtagatatttattcacattttatctgggccacatatcaaacaggggaagctacagctcatgttaaaaaaccttttttttgctttgcagttatgggaatcccagaaaaaaccaaaaccgataatggcccagagtattgcagcaaagccatggctgcattttttttttttttttttttttttttgagacggagtcttgctctgtcgcccaggctggagtgcagtgaccaatctcggttcactgcaagctccgcctcccgggttcacgccattctcctgcctcagcctcccgagtagctgggactacaggcacccgccgctgcgcccggctaattttttttgtatttttagtagagacggggtttcaccgtggtcttgatctcctgacctcgtgatccgcccgccttggcctcccaaagtgctgggattacaggcgtgagccaccgcgcccagcagccatggctgcattttaacagcagtgaaatattactcatactacaagtattccatataactcacagggacaagagatagttgaaagagctcattgttaacttaaaaactcagttacaaaaacagaaagagggagaccaggtatataaaaccctacatatacaattacacctcgctttattaacattaaattttttaaatttacaaaaggatcagcccatgacagcagctgaacaacacttaacaggacaaaaggaaaataaaaatgccagacaagatatacagtggagggatgcacatacaaagagttgggaaaaaggaaaaataattacatggggaagaggatttgcttctgtctctccaagtgacaatcaggtgcctctgtgggtgcccaccaaacatctgaaggtctatcatgagccacaccaggaagagaggactctgggaagagccagaactccctatacgagtgatggcatgaatgaaaatctcagagacaaaggaaaagaccaagaatactcaccaggcagaccctccaacatggggacaaatcaggaaactggcacagatgcagaggacaatctgagagcacagaacaaatcaaaaacaactagtaacctaatggtggctatgatggtggtacttactgtggcggtaagcctccctactgtaaaagcaactcaaaattttacttattggacttatgtcccatttcctcctttaattaggtctgtgagttggatggaccctattattgaggtgtacaacaatgacagaacctcgatgcctgagcccatagataacagagtgccgatgcatcctaatgaggaagggatgaaaatgaatatatcaataggatataaatatcctccaatatgcctaggacctgctgctggatgcttacaaattggcacacaagtatggttggcagtaatccctggaaaaaataaatcacaggctactttatatatgatttcagggcaaagtttaaaatataaccattccagccctgaaactcagcagttctgaccagacaaactcgaatgtaaacaaaatagagtttggtttgaaggtgtggacgcttggcattggggaaattgtgtagcaagtaaggctggggtgctacaaaataattcctatggaatcgtcattgactggtcccctaaggggatttttaagaaaaattgcactgaagggccttcttataaaataagctgatggactcattggaaagagaaccatacacggtacattcagacggaagctgatgttcctattatatggagccctggtggcattatcacccctattccaaaaatgatatctcctgccataggacaggaacattcaggattatggaaattagctatggctcaaagttcaatcacaatttgggagggtaaatataataagtataaaggggagggaggtaaatataaatatgttctctcttttctttctaacaggaccttttggaatcaaaattgtgtccgaccaccttttacgttagcagtaggaaatattactcttctttttttttttttgagaccggagtctcgctctgtcccccaggctggagtgcagtggtgtgatctaggcccactgcacgctctgcctccctggttcatgcctttctcctgcctcagcctcccgagtagctgggactacaggcgcccaccaccatgcccggctaattttttgtggctttttatttatttattttttttagtagagacggagtttcaccgtgttagccaggatggtcttgatcttctggcctcatgatccgcccgccgcagcctcccaaagtgctgggattacaggtgtgagccaccccgccaggccggaaatattactctttacataaatacccgttttatcacctgccaggaatgtcacttgtttacttgcattaacgacatcttgataaaaatcaaactatcttgttaattagagccagagaaggagtttggatccctgtgtctctaaatagaccatgggaggcatcaccgtccattcacattataactgagatccttacaaaactcttatcccgttcaaaaagatttatagttgctcttatatttgctataattggcctcactgcagttaccaccactgctgcagtagctagtgtggctttacactcatctgtgcaaactgtcaaatttgttgataaatggaaaaagaattctatgaaattatggagctctcaggcccaaacagatcaaaatatagttagtcaaattaatgatctccctcagacagtaatttggatgggggattgcatcataagtttagaaactagaattcaaatgcaatgtgactggaatacatccgatttttgcgttactcctcatagttagaatgaaacagaacaccaatgggaaattaaatgccatctagtgggcagagaggaaaatctcacccttgatattgtaaaagtaaaagagcaggtttttgaagcctctcaggctcacttaaccctgctccctggaactgatattttcagcgaggcagccaatgggttgtctgcaatcaattctcttaaatggattaagaccactggaaactctacacttgtaaattttgttctaataattatgtgcttgtgctgtctccttttaatctacagatgcggaagccgcttctggagagaaagccgctgccaagaacaagcaatgatagctgtggcggttttgcaggacaaaaaagggagacatgttggcagaagagctgaggcagggctcgtttttctgacataatgtaaaagagtcttggaacatgtcctgggtccagggtctaaaacccctcatgacctttggaacaccaaactctgtgccaaagggtggaaggctgccctgccgcagtacaatctaaacccagggtatgaaaccccttgtggcttggagagaacccagggctcagggcataaaaccctctgtagcctttggagtgtgtccagactcactggccccttgcactttgttctcccaagatcataaattgattgtatcttgaattagaagaacctattctcccttatctcaagtagcagagcatatgctaagccatcacagctacgcttgatgcaccgctttctacccccacatcctcacctgtctgcccccacatccgcacgtcctctccacctgcttctttgtttgattaccaataaatagtgtgggctcctagagctcagggcctttgcagcctccatactggcgttggcccctgagacccaccctatgtactcttgtcttgtctcattcctttgactctgccagacttcatagccccagtgaccaggtgttgggtctgatcaccccaacactttgcctccaccggtcccatgccaccctcgctttaagcccctgcctttgaaagcaggtcatgttcactgagatgctggacactgcaggtatctgtccctgggacagcagggacctctgaagcttctttgtggcctggtttatacttttttccatcttgtggtttttctaatggactttcacggattttgtaatctcgtaactttccaagctccatcacttcctaaatcttaagaactgtaattgacagtttaaattgaaggtgctgtttgtagacttaatacccaatgaaagcccaggcatcgccgggagtggtggcccacgcctgtaatcccagcactttgggaggccaaggcgggcggatcacctgaggtcgagcgttcctgactagcttgatcaacatggagaaacctcgtctctactaaaaatacaaaattagccaggtgtgattgtgcatgcctataatcctagctactcgggaggctgaggcagaactgcttgaactcagggggcagaagttgtggtgagccaagattgtgccattgcactccagcctgggcaacaagagtgaaactccgtctcaaaaaaaaaaaaaaaaaaaaaagcccagccatcatgaagaatcctcgaatgttctctgaagaaaatgatgctgggggctgggtgcagtggctcatgcctataatcccagcactttgggaggccgaggcatgtggatcacctgaggtcaggagttcaagtccagcctgaccaacagggtgaaaccctgtcactactaaaaatataaaaaagtagccaggtgtggtggcgggtgcctgtaatcccagctactctggaggttgaggcaggagaatcattggaacctgggaggcggaggttgcagtaagccaagatttcaccattgcactccagcctgggcagtaagagtgaaactgcgtctcacacttgatcttagccaaaaggctgagaagcactgaaccaaagccactgcgcccggctgggaaagttcttctttacagatttatagttcttctttatagattctttcttgctaagtgttgaaaagataactataatcatctaaagaggattaattcatcacttaggcaaagtagaggttagcaagaggaagttacttctcttagagtatgtgattcaaaggaaaaaattgctacatcaaatacacaccgactggctaaacatttctaggtacgtatcaatttctatgccactttcagattcaacacaatgaggaaattactggtgtaataaaaataacaaacattagattgatgaagcacggtaaaataatttcaaacaggaaagatgtatgaatcttttgtacaaaaaaatttcaacatataagttgcatacaagcaggaagatttaacttcataagagaattaacaaaagttgtattaattcaagacaagagcctgcagagactaaaattgcttagtactgaaagttttgcctatataaactgtagtttatgaagaaaaaagttttgttttttttgaggcagggccttgctcttttgcccaggctagagtgcagtggtaccatctcagctgattgcaacctccatttccgaggaaggctccttaatttcccaattataaaggttttgtgggaacataattgggtgtaataaaataaaaatttacaccacaagagacagacacatactcttcagggtgtatggtcataatttgtttgaacgagcccttttaaacttctagatatcattgaaactcctatgttgattaaaaatcatcaaagatctttccagtgagaaggatgaaaaatattactgagaatgaagtatcactatttcatgtatgtgcctgtatgtgcttatataacatgctgtaatacaaggtgacatttaggggctgagactgttaacatctgactgtaccttgctatttgtaacttacaatcttattcacatttctcaagtgccatgcctttaggtgcctatacatcatgctatcataggatttctagggataagccgagtgccgtggcagatgcctgtaatcccagcactttaggaggctgaggggggtggatcatgaggtcacaagtttgagaccagcctggctaacgtagtgaaagcccatctctactaaaaatacaaaaattaggtgggcgtggtggagggaacctataggcccagctacttgggaggctgaggcaagagaatcacttgaacctgggaggcggaggttgcagtgagccgagaccatgccattgcacttcagcctgggtgacagagtgagactctgtctcaaaaaaaaaaaaaaaaaaaaatttagggataatatctaagcccatataacctgctgttataaaaggtaacatttagggattgagatttttttttttttttttttttttttttgagacggagtctcgctctgtcaccaggctggagtgcagtggtgcaatctcggctcactgcaacctatgcctcccaggtttaacgaattctcctgcctcagcctcccaagcagctgggactacaggcacccaccactatgcttgggtaatttttgtatttttagtagagacagggtttcaccatattgtccagggtggtcttgaactcctgaccttgtaagccacccacctcagcctcccaaagtgctgggattacaggcctgagccaaaacacccagctgagattcttcatatagctgattatcttgccatttctaacttacaagctttatccacatttcttaaccttttgtttcactaaatgggacaggaagttttaactcttgtatccatgaagcatcttagtaaaataacagatattccatttgcaaattatgctccccaaaaaacacaaacacatatgtaaaaaatgttataaagacattaagtgtccactcaataactttgattcaaactatcttcatgttcttcacttcacaagataaagctcttaaaatggactttgtgaggttccatgtgtttggtcagtcatgagaggaagaataattcagagtgagaggaaacaagagagattctaggcagccctcagggaagctgaggaggtggctccctgcctccgggtccctcagaatgtcccatctccctgtcagtatcagtgtcccagataatcttcttctgactgggacatttcccaatttgggaacagtggttacttgccaaattcacatttacggccaaaactgtggctacagtgtcgacattcatgcaagtggggaaatgggcatgtggcccctgaaaaaagattctggattccataatctcaccttgctggcaagaaactaccatttcagcagaaagtgcaatgacagtgtctgcacagggactggagattatctccagaaaagagcttggagtgaggaaattagttaatgtggatgaatgacgttacccatggagaatgaagtaagtagctagaagacaaaagcctcagaacacataaatctcaacgggtactgagtagaggactcggagctctgaggtaattggagctcatggctatcccagaacttggataacataaagttcttgtttctacaaagtgtgtatcctttccatatgtgagaactctgaggaaatacaaacttggaacaaaagaaatagtaaggtaatcttagaaagatgttgaatagaaagcaagctacggtgacatcttaactgtttcactgcccagcaatctatacgtattgtcacttggggacacttatgattccacatgaagtggataaccagctcatagctcttgtggtactgaaaaccaagtatttggccgggcatggtgtggtgtactcgtaatctcagctccttgggaggctgaggtaggagaatcacttgaacctgggaggcccaagttgcagtgagccaagattgcaccactgcactccagcctgggtgacagaatgagactccgttccaatgcgaagtctcttaagaccaaggagagcagacattctgatgtttcccagattgacagcactcataaggcctttctccagtatgaactctcctgtgtttaatgagacgggatgtttcagcaaacgatttcccatattcactgcactcataaggcctttctcctgtgtgaactctgatgatgaaggagggtagagcttcgctgaaatgtttttccacatttggtacattcataaggcctttctccagtgtgaattctcctgtgtttaatgagactggaacattcagcaaaggattttccacattcactgcacttataaggcttttgtccagaatgaactcttttatgaacatgaagcgcagagctggaaagaaatgatttcccacattcattgcattcatacggcctttctccagtgtgaatcctctgatgtatagtcacgcagttcttattaccaaataatttcccacatacctcacacgcatatggcctttctccagtgtgaactctctcatgaacgagaagatgatacttcctgttaaataatttcccacattccctacaattgtaaggtctttccccagtgtgaagtctctggtgttcagtgaggtgggatctgtacctaaatgatttcccacattccttgcactcatagggcctttctccagtatgacctcgctgatgttgaacgaggttgcccttttgaccaaaagattttccacattctccacacttgtaaggcctttctccagtgtgaacacgctgatggttaataaagcagaacttctgacgaaaagatttcccacattccccacagtgataagctctctctccagtgtgaccttgctgatgttgaatgaggttacccttttgaccaaaagatttcccatattctctacactcataaggcctttctccagtgtgaacacgctgatggctaataaggctgcccttctgactaaaagatttcccgcactcctcacagggataagctgtctttccagtgtggactcgctgatgttgaataaggctgctctttcgactataagatttcccacactctccacaatcataaggtccttttgcagtgtgatctcgctgatgattactgaagctgacatatctgctaaaggattttccacaatcactgcacacataacatccatctctagtgaaaagtttctggtgtggaataactgagtgtttggtgctgaaggcttttgtgcgttttccacaactgtaattagtttttccctcctgaaagggtgggccatgcatagtttcactgtctgtcttctctacagcagctgcttcttggcacaatcctgaactgggcagaacgtccttcccaaactcgcggaagacaaatggctcctgtgacaccctgagcttacgtttctttacaaacgatgcttctctgacactctttctgtagaatttctctccaatatgctgcttctggtgctgatgaaggtatgcagtgtcatccaagttttttccacatgctccactcctgttcagcttctgcttgtgatgagtttcctggtggtcagcaaagtgaaaaacatcctccaagatgaggccacacatttcacaggggtgagccttcttaggagaaacacctgccctaggagtcctgctctgagactctctttgtacagaaattctctgcttacaaggtgcctcctcatcttttgatccacaccaacaacctgagagcaagaaaatgctggtcaagtgcaaagtacctctgacgggaaggcacagcccacccacaagtacgtctcacaaattgaggaattaatctatagaaatatttgcaggaacacaatgttggcttcaagttgaagatggggctgctggccgggcgcagtggctcacgcctgtaatcccagcactttgggaggctgaggcgggtggatcacctgaggtcagaagttcgagaccagcgtgaccaacatggtgaaaacccatctctactaaaaatacaaaaattagctggatgtggtggtgagcgcctgtaatcccagccactcgggaggctgaggcaggagaatcatttgaacccgggaggtggaggtttgcattgagccatgatcgcaccactgcactgcagcctggataacagagcgagactccatctcaaaataataataataataataaaaagaagaatgagctgcctagcattactgggctataaaggtcacagaatccaggaggcctcatgatgtaaagagcacaagcatacaggcaacacagggagtagaggcagggtccacagctccttcctctaaacacaagttgtgtacgggaccttatctcctaatgacatgtgagtgctatgtagaagcatatggactgggcgcggtggctcatgcctgtaatcccagcactttgcaagggtgaggcaagtggataacctgagttcagtagttggagacgagcctggctaacacggtgaaaccctgtgtctactaaaaaaagaaaaaattagctaggtgtggtggtgcaggcctgtaatcccagctacttgggcggctgaggcaggaaaatcacttcaacctgggaagcagaggttgcaatgagccaagattgtgccattgcactccagcttgggcaacaagagcgaaactccatctcaaaaaatataaatatagaagcatatgtcaagaccaagaaaacatgagtacaacacagcagagggtggtcatggatggtttaacatagggcatacacttcctaatatgtaatcgatacaccaatatcagagacaagtgcagatgaaagcacaagaaaaatgggtgagatgtgagtattagtgctggggtggatatcacagtagaagtgaaaaggtacagaactaacacgtgtgaaactctcaacaatggggagaaaaagacaaatagtgtgtgcctactcatattgccacaaaaacacttggcaaatataaatggtttctggtatgatttggataaacccctgaagtcatgccctcccccagcatggcactcctgagggacaggctccctttgagcctatcgtgatgagcctgaattgaaccacatcttgtcaaacatggaggtctctccatctcacacccagtacataggacccgacgatgtaactatgaagggagagacagcagagatgaacagccaacactagctcaggacaactaagcacctgacagcccacaggagagtaaggtaagtattacaaaagaattcctaagcagggtcttgcaagaagagtctatggtctatggtctatgtaggtagtgacaatgtcaatgaaggcaattcttggcacagggaggcacaaagcattgtcagatagaggaaggaagtgttaatagaacctgggcacacaagagctaccgatttggacagtcacctgacagccagagagcaggcaaagtggatacacttaggtgcctattagactcctgactctgactccttccctgggagcctggagcaaagcaggtgttggaggtgcttaaggaaaggaaaaggcaatacacacaacttacatagagaagtgtagaaggaacctgtgtccaggctccttaagtgagaaagacagtcctgtcaatgaaaaacaggggaacagtaacactagctcaggtcacaaaggtgagcgtgagcaacttacccagcgaggatatgagagccaggttctctagcatcacatcacggtacaagcacctctgagcctcactaagaagacaccactcctcctgggaaaagttcacagccacatcttcaaaggtcacagtgccctgctatgatagtgacagatgaaaccacaaacagcccctctgctgaggtaccacaacccacctctcccacacacccacacttgcccatcctcctcccaaggtccccaacatagtgttgaaactatgtccactagtgcctttgtctcttcatgggcccactggtcaattgccatcagcaataagcagtaagtggacaaataggtatccatgctgaggtcctgacataaaaaggtccatccccttctgaatagcgatatccaagctcatgtaaagcccagggcagctgcctgagcccattggacaaactccctctctaaatatacatcattctttatactgcaaagacacatccccatggccacccctacctgagttttccctaccatcagcctctctctggcatccccacaaatagaactttgttttttggggttttttttgagacatagtctagctctgtcacccaggctggagtgcagtggcatgatcttggctctttgcagcctccgcctcctgggttcaagtgattctcgtgcctcagcctcccaagtagccgggattacagccacgcaccactatacccggctaatttttgtatttttttttttggtagagagggggtttcaccatgttggccaggctggtcttgagctcctggtctcaagtgatccatccgccttggcctccaaaagtgagattacaggggtgggtcactgcacccagcccccacaaataaaattatttcacaagatgaagagggtataacggcccatgattcccttgggaatatgcaatggtttgtttccataactctgctggtagggatggaattgaaacccaccacaaaatataacaacctggaaccctgccttatcaccttgataaaacgggctgttaggctaggatacattattcaagagagcagagtgggaatgagatttgtactcacaccttttaaggttgtcccactttcacaagatgtcaaagtgacacatcatattgggccttcaattctggccttataccaaaatgtggataagcatccagactatgcttgacaaatacaaataggatccaatattaacacagaatttccatggtttacaatagcagtggtaatcccaaatcatcctgtgaacgtctcccggaatgactccatagccacacagaaccacatatggcttcagatatccatggacctatttcacttttgtgctgcaccagctgagacctcagctgtagcaaccctcctctgtccatctaatgctgtttaaagcccagcccctggatttgtgaaccaaaccacatctactatcacagatgagcatatttttcactgcccacatgcaccaagctgaatgaaactctccaggcactcccaaagtcatctcaaaacgtttatgaatccagacagtgataaatagttacaacttggcaccaactcaggcagaagtgtcatcttccttactcctatgcttctgcatgcatctatctcatctattctctcctcggatgtctatgtccccttccaaactctactgtctgatacatcctgccatgatgttcactcacaccctctcaggtgtttaggaagcccaataacatcactcagggacgtaagtaagagatccactcctcagcctgtagtcacaccttcctggcccctgaaaagatttaccaccaaaatctgaagcatgtcctcctaaatggacccataactaacttactgaagttcacccattagctttcaaatattggatgtctccagtatcaacaccctcccagataccccatcctgtatgtctagttatccatttaatgccaccatttattggtcactgactcttcatatggccaaaacaacactcttgatatccacagtcaatattatgtcaataccaacttcatgtcagctgatgcagcgtccatggttacagctgctaagatcaaaaaccttgggctcatgcctgattcctctttcatgcccttatcatccgcattagaaaacctagctgtctgtcaggcgtgatggctcatgtctgtaatcccagcactttgggaggctgaggcaggcgaatcacctgaggtcaggagttcgagaccagtctggccaatatgatgaaaccccgtttctactaaaaatacaaaaattagctgggcgtggtggcaagcacctgtaatcccagctaccttggaggctgaggcaggagaatcgcttgaacccgggaggcagaggttccagtgagccaagattgcaccactgcactccagcctgggcaacaagaccgaaactccacaaaaaaaaaaaaaaaaaaaaaaaaaaagacagaaagaaaacctagctgtctctttacaaaaagtgaatcctgtatccagactcatgtgatttgccacgtatctgatccactaaccctcacctggattatggcaggagccttatctctgacatttcttcctcttccctcaacccatagtgtgtgcaccaaggtccaaccagatgaagccggtagccagtagaactgtggtaatatcaccttctgactttgatcctttttatctctaagcatttcacaacctggtagcaaatcctgggttaatcttacaagagtgtttacactggctgacagaaatgggcatacttgcatataacctgccatggcctcagtatcctgtctttagagattctccagggtcctcggatcaaaggactgaaaaaatggcacttaagagtcccagcacaccacaagctagagaacctgtggatggggtcaagaccaatgaggggattgaacaccctccacttccctgtgtgggttccctaagtgcttctgcagccaggagtgcctgaggggagaggcagacattacaaacatgtcacgggatttgataagctcaggcctccctgaaccctttcttgtccctggaaccaggtaaccctacggctggttgtctgacctgcttgtctcagtgcaaaatgtcatctctaccacctatgtgagctacaaaaaggattcaacctcccaagaccccaaagtcttcatcctctctacgatattcttcctttgaatgtcctttgggaaaccttaaaagcctggatttggatcatgtccctcctttattcaaaactctccatggcttctagcgtcctcaccttgaatgcacagccctcggcctgcttactcttccagggagagctccacctcacactttgttccagacaggttccatcctcccggctccgtccatctccaggccattgcctgcgcccctccctgtgcttgttgctctccccaccgcatcccacgggtgtcagaaacaggtgaaaccgtctttgcaaaattataactgaggaaattatgacagtgaaagaaatcagaccttactgactccgtcttgcttccaacctttcagctgtccttgttcattcctgggtataggctgaattaacttagggaaggaattcagttcatggtttcactctgaaacaaaattgataatagccctttcctgaaaagacccccttcttgcctggagaacagcctgcctttgcaggactaacgaattagctacaaggttagaaattaccgtttaggggtcatgcagcttctgactccaagagtctgaacctccccaagttgctcctgaagataaatcactattgtaaaacctaagatcagtgcttgaggtattttgcagatcctgcactggatggatcagctgacaacacacagaccggtaatctgggtcaatcagttctgccatcccacccagaacagaaaacagcatgaaaaactcactttaaccctctatgaatccatctcaggtcccaacccttaccgccaaattaatgttgaaaactctgatcccggaatgctaatggagactgatttgagtaataataaaactcctgtctccagaacagcctgacggctctgcgtcaattactatttctccatcgcaattctccagtcttcataaatcggctctgtctaggcagctggcaaggtgaacccactggacagttacacagggacccccactggacagttacacagggacccctcctgcgagcgcctcagtgttcctacgccgggtaccggctacagacccgtgagcaggagccgctccctcgctggtttaggacctgggtgacgatggggtgacctgagggcacagaaggcgccacaattacctgagtcgggcgcctcggcgcagccgctgccatcggactacttggggaagcacggcccgggagcagtggtcgccgtcacggggctgcagagccgcctctgggcaccgaggacgattcctctccaccttctaggttcagtcaccgcggtccccccccagcactcaggggccacaaactggggaaacacccgcgtcaccgatacacagccgctactagagaccccggaagtctcagccttacgttacgtgcacacgtggaaatgccttctttccgagtgctcattggctctgaccggctgtcgtttaacgcagagctttctgggtaatgtagttccccactttccatggcgctaaaaagagcgatacccagagtccatctgcaggaaaagcccgccatcaggtcaggggttctccttaaaaagcgcacccttctggccgggcgcagtggctcaagcctgtaatctcagcactttggaaggcggaggtgggcggatcacgaggtcaggagatggagaccatcctggctaacacggtgaaaccccgtgtctactaaaaattcaaaaaaaaaaaaagttagctgggtgtggtggcgggcgcctacagtcacagctactctggaggctgaggctggaggagaatggcgtgaacctgggaggcagagcttgcagtgagctgggatcgcgccactgccctccagcctgcgcgacagagcaagactctgtctcaaaaaaaaaaaaaaaaaaaaaaaaaaaaaaaaaaaaaaaggcgcctttctagggcagaggaggggtctcacctagccttagaagccgtattgagattcctggagactagtgtctgtaactaatcactcaagaatctggaaaaatactgtttcagatttcggggagcgcaaggtaaataatagggagctcaagctaaaactattatttaggattctcctaaaggctaaaaatccaaattaccacaccgtttgaaacagtcgttcagtcgcaaaatacctgcactggaagcagaggctgataagcgttgttgtgttataatgtgtctgaaggccctcagaagccttagagtgcctaaggcaaatgaaggaagttagggatgtgctcccctatagcaggagtgcaaagctgaatctctgtgattcctacagaaaacaactctcctgctgatagaatctgtgaaaggaaaatcttgtggcctcaaaattactaagctaaagggaaaagtcaatctgggaactgctcagggcaaacttgcctcccattctattcaaagtcttccctctcctcactgagatagatgcctattctgattgcctcctttggaaggacttatcagaaattaaaaagaatccaactatttgtctctctacctgtctacctgtgacctggaagtcccctccctgcttcgagttgttcccgcctttctggtcggaaccaatgtacttcttacatatattcactgatgtctcatgtccccctaaaatgtataaaaccaacctgtaccccaaccaccatgggcacatgtcgtcaggacttcctgaggctgtgtcacgggcatgtgtcctcaaccttggcaaaataaactttttcttttatgagacggagtctcgctctttggtcaggctcgagtgcagtggcgcgatctcggctcactgcaacctctgcctctcgggttcaagtgattctcctgccttagcctcccgagtagctgggagtacaggcacgtggcatcacgccaatttttgtagtttcagtacagacgggggtttcaccttgtttaggatggtctcgatctccctcgtgatctgcctgcctcaccctccaatgtgttggggttacaggcatgagtcaccacacctggccagcaaaataaactatttaaattaactgagacctgtctcaaatttggggggttcacaaatcattatagcgttcaattaattgaacaacactttttcccacttagtatcctttacttgatattctaacttacattcaactccttttagtaatttgacatcagtcttataaagaacaataaggctgggcacggtggctcacgcctgtaatcctcgcactttgggaggccgaggcaggcggatcaccagttcaggagatcgagaccatcctggctaacatggtgaaaccccgtctctactaaaaatacaaaaaaaaaattagccgggtgtggtggcacacgcctgtagtcccagctactcgggaggctaaggcaggagaatcacttgaacccgggaggcagaggttgctgtgagctgagatcgcgccattgcactgcagcctggcgacagagcgagactctctcaaacaaagaaacaaaaaacaataaaataaatggtatcttggtagtagtgatggctacagtctgtaaaaagtaaagtacaggttcctcttcaaagactttcctcccatctaattaggaataaatagtaacttctcttagaagcaaaatttattcaaagacctgtgctaacattcttaaatatcttctagccgtaattaaaaaaatccatgtactttatgttcttagctcccacaatttagcctaaatatttgccctggcatgtttacactggtccaagcaagcattgtcatagcctgttcctcttatttgaaggtgtttttgcctttcttagcattccataagttaattcctccttcgttttcctcttgcctttgcctcttttaaaaatgttctaagttgctagtcaatcaggacaaatacagaatgtgaatttgtatttagccagtggaaaccggacacagcagtaaggtggatgcgtcaggcaggttataaatgaccctgtctcctttgttcagtgtaatctcacagcaaaactgctggcgagtataccgtttctgcagaaagtaaaaatggccttgctgaggaaattaaatttatgttcaatgctatttctttctttctttttttttttttgagacggagtttcgctcttgttgcccaggctggagagcaatggcgcgatcttggctcaccacaacctccgtctcccaggttcaagtgattctcctgcctcagcctcctgagtagttaggattataggcatgcgccaccatgcccagctaattttgtatttttagtagagatggggtctctccatcttggtcaggctggtcttgaactcccgacctcaggtgatcctcccacctcggcctcccaaagtgctgggattataggcatgagccaccgcgcccggccaagtcaagtgctatttctttacggcactaaagaacaagcatttcaaacagtacttaaagttggtgctctccatctgttcatactgggcatttgtaaaagccatgagttcatgtcattgatgggaagtgattatcattgatttgagaggagggagtgttctgcatgaaaaattaatattacataagagaaacagttgtaaattgcaagatacaaaagcctattaatactgactaggtaggctgggcgtggtggctcacgcctgtaatcccagcactttgggaggccgaggtgggcagatcacaaggtcaggagatcgagaccatcctggctaagacggtgaaaccccgtctctactaaaaatacaaaaaattagccaggcctggtggcaggtgcctgtagtcccagctacaggggaggctgaggcaagagaaacgcgtgaatccaggagacggagcttggagtgagcggagatcacgccactgcactccagcctaggcatctcaaaaaaaaaattagccaggcgtggtagcaagtgcctgtagtcccagctacttgggaggctgagacagaagaactgcttgaacccgggaggcagaggttgtagtgagcctagatcgtgcaattgcactacagcctgggcgacagagcgagactccgtctctctcccgctcccccaaaaatataaaaagcaaaaaacaagaaaacattgactaggtaattattaaacagttttgacagaagtgggtctatggaaacatcagtagatggtgaaaaagcttaggacctcagagaaatgttagcaccaatgtccaagagattaaattatgctcagcacataattggaatggtcagtctgatggttttggctttaaaatgagattcttcttcttcttttttttttttttgaggcagagtctcactctgtcacccaggctggagtgcagtggtgcgatctcagctcactgcaacctccgcctcccgggttcaagcgattctcctaccgggtgtggtggctcatgcctgtaattctagcactttggggggctgaggcgggtggctcgcctgaggtcaggagttcaagaccagcctggccaacatggtgaaaccctgtctctactaaaaatacaaaaattagctgggtatggttatggtggcgcacacctgtaatcccagctacttgggaggttgaggcaagagaatcacttgaacccaggagtcagaggttgcagtgagcagaggttgcaccactgcactccagcctgggtgacagagtgagactatgtctcaaaaaaataaataaatacataaaaagatgcctcagcctccagagtagatgggattacagacatccaccaccacgcccagcaaatttttggatttttagaagagacgaggtttcaccatgttggcaaggctggtatcgaactcctgacctcaggcgatccacctgcctcggcctaccaaatgctgggattacaggcgttagccaccatgcttggtcgatcccttttgaattaagttggttcatacaatcctccatccaacctcatggcatgataggtaattttctcacaacggaatacttgttttctgaaaggagttgtttataggttaagcaaaaccaatttaagagctttcagcaaagtaatatgaaaagcttctgttaatttcgccaggtgagagacagggtcttactctgctgtctaggatagagtgcaatggggcaatcatggcccactgtaacctcaaatccctgggctcaaatgatcctcccacctcagtctcccacacagctaggactataggcatttgccaccatgcccagctgttttggtagagacagggttgtgctgtgttgcccggctggtctctatcatgcttgatccctaccctgttgacttcaacaaggatggcaccatgtccaagaactgaatgagagccagagctagaaaatgagacatagagctaggcgtgtggctcacgcctgtaatcccagcactttgggaggccaaggcaggcggatcacctgaggttgggagttcgagaccaccgtgatcaaaacgcagaaaccccgtctctactaaaaatacaaaattagccgggtgtagtggcacatgcctgtaatccctgctacttgggaggctgaggcaggagaatcgcttgaaccgggaggtggaggttgcagtgagccgagatcacgccactgcactccagcctgggcaacaggagcgaaactccatctcaaaaaagaaagaaagaaagaaaatgagacatagggtttattgaggacttagatacagggcagtccaggagcggcaggctggacaaaaaaaccactatcatttgaaagaagcatgcagtttatatagtattttcacttatcaccctccgcctagctcaaaacaaagggcctcattccaaggaacaggccaggggttcagaaacctccaggttggccactcctggatttcttcgtttggaacgctgaaccaacactcttcttagaccacagggtcattcttagggtgtgcttgagttactgctgtcagatatatctgttatacagtgtcgaactcctggcctccaggatgttcttgccttagtctcccaaaacactggaattaaaggcatgagtccctgtacatgacgagatgggcttttattaacctctttgttagtttcatcaatcgagaagagaggggagggtatgcaaaataaaaatgttagaaaatgggccacactttacaaattgagattatgtctccagttaaatgagttcccctattgctgtgtaattcacaagaaattctccaagagggagttaccaattcaacacatatttacccatgacttccacggtggctcttctgtaaggaaatgcttgaacccaaagagagaacatgcagatcataatcagttcatatttataatcttgggctggaggcaaatgcatacagtttaccaaatatgaaaaggtgaggtgggcaaagggaaatgcccttgagatccctgaaaagaaagaaaattcagttatacatttgatacttaaatatatgggacaccactttgttaaattgcaagaaaaaaaccaaaagcatgccaggcacagtggctcatcctgtaatcttagcattttgagaggccaaggtgggaagatcccttgagctcaggagttttgagagcagcctgggcaacatagtgagacctaatctctacagaaaaattttaaaaattagctgtgcgtggtggcacatgcctgtccctagcaacttgggaggctgaggtgggaggatgacttgagtccagcaggtcaaggctgcagtgaattgtgattgtgtcactgtactccagcctgggcaacagagtgacactgtctcaaaaaaaaaaaaaaaaaaagggccaggcactatggctcatgcctgaaatcccagcactttgggaggccgaggcgggcagatcatcacaaggtcaggacttcaagaccagcctgaacaacatggtaaaaccccatctccactaaaaatacaaaaattaaccgggcatggtggtgcatgcctgtaatcccacctacccgggaggctgaggcaggagaatcgcttgaaccctggaggtggaggctgcagtgagctgagatcgtgccactccagcctgggcagacagacggacattctgtctcaaaaacaaaaaaaattaagaaagaatcaaaagcaactttctaattcattgcagacgggagtatttttctatttagtgacacacttacctaacccatttatgccaagggatgcaaaatatatatatatatacatatacacacacatacatatatacacacatatatatacatatatacatacatatacatacatgtatatacatatatacacacacatatatacatatatacatatatatacatacacacacacacacacacacacacacatatatacacatatatatatattttttgagaccgagtcttgctctgtcacccaggctggagtacagtggtgcgatcttggctcacggcaagctccacctcccgggttcactccattctcctgcctcagcctcccgagtagctgggactacaggcgcctgccaccacgcccagctaattttttgtatttttttagtagagacggggtttcaccatgttagccaggatggtctcgatctcctgacctcgtgatccgcctgcctcagcctcccaaagtgctgggattacaggcgtgagccaccgtgcctggccactttcatgggtttctatgaaagtctaaacttaccacatggtacagtttaaatatgtatagtttacagaatgtcatttattccttattatggctttaaagaattgattcaaaagaaaaatgtgggctggacatgatggctgaggcctgtaatcccagcactttgggaggctgagggaaaaggattgcttgaggagttcgaggctgcagtgaactatgatctcgccactgtactccagcctgggtcacagagcaacaccttgtcttagaaaaaaaaaaaaagaaaaacatggattttctattatttttgacaaacatgcttgacaactatacaaaatctcctcatgtcctaagtgcagcaatgagtctctgcggcagcaaatactgataagccaggaaggccattttcacctgattaaattggaacactggttggtcacaaagaccacatcactggactaagagatctcccttctccctatcctcttcctcctgccaatgcaggaattgccttgaggtgaacagccgagaaagggtacaggaatccacgaatcctttatattatttcctttgacaatggcctcagctacacaagattcataattatggaggttctgagaatttctgtacctgacagtccaccacatacatagtaactgaatcaatgtggatgacgtgcattccaactctgttcttgcagtgtcctccactgcctataaatgcagaaattctataaattatgacttcctgttataatctcataacctgggacaccacactacgaaactctggatatcagagcacatggctgcattccaggacctagggaacagatttccctcagcagtactgagcagaatgcaatatcccttgtaaaagagaggaaattttcgtgtcgatctcagaagcatcagaggatgtcacaaacactgttcccttctcaggtttatctataaacccagaaattattggagtatctagtcaacaaataaggaccacaaagttctggagtctttggaggccttgggcagccatgaaaactatgccacaagtgaagagacagtatattctgtcatcatactgtcccctctgaggcacacaaagtctagtgatcccaacaaaagctgtctgcccctttatgacaccagaacccagttgtttccaaaccacccgaaagagtaaatacaactctcaagactgaaggaagcttaaacaataaggccttattcattgcacaaatcagagcaatgggaagcagaatgttctttggttggaacttaagagcctaaagaatcacatgagacccgctgggtgcggtggctcacgcctgtaatcccagcattttgggaggccaaggagggcagatcatgaggtcaggagatcgagaccatcctggctaacacggagaaaccccatttctactaaaaatacaaaaaaattagctgggcatggtggtgggcacctgtagtcccagctactcgggaggctgaggcaggagaatggcgtgaacccgggaggcggagcttgcagtgagctgagatcacgccactgtactccagcctgggcgacagagcgagactctgtctcaaaaaaaaaaaaaaaatatcacatgagacccataaggtccctgaaaaaggtagtccatcttttcaagctgacagaagacccctctggaccagtactgagacagatccatggtctcgctcatccgaaagaaatgagaaaggaatgacagctgagactactcaccaattcctctggccaacgaaagacaaccaaggtttacttccagaacatcatggggtgaatgaatgatgcacagtgaacacctgcctcgtggccgacataaaatggcttttgccagataaccgacatcatgtctggcaagggaacccggcagggtgaaaaatgccacacagctccaacataattgagtttatgcagatgctgaaggtatgtcaatttaggcagatggctccgtcataaggcatctcctccagtgttatgttttacaagaaataatatttcctgtacgtgtacagtgttttccttatgagaacaatctgttatccaatgacagaaggcagaaggctttctcacattcatcgcactcaagaggcccttctgcagtgggagctcttctgtatgtaataaaacaagacttctgcataaagaatatcccacgtttgtcacactcataaggtcctgatccagtaagaaccctctgatcaagaagatgcacagaggtttagctaaagaatttcccaaatttcttttcacttgtaaggacttctttctgtgtgaactctctgatgtcgaaggagagaagagcttcgatgaaatgattttccacattcactgcactcataaggcctttctccagtgtgtactctcctgtgttcagtaagactgaaggtttcagcaaaggatttcccacattcgctgcactcgtaaggctttcctcgagtatgaagtctctgatgtttaaaatgcgcagaccttcgagtaaatgtttttccacattccctgcattcataaggcctttctccagtgtgaactctcctgtgttcaaggagactggagaagaatttcccacattctctgcactcataaggtctttctgcagtgtgagttttctgatgtcgaaggagggaagagctctgatgaaatgactttccacattctccacattcataaggcctttctccagtatgaactctccgatgtcgaaggagggaacagctttgaggaaatgacttcccacattcactacactcaaacggtttttctccagtgtgaactctctgatgaacacgaaacccagagctgtcttgaaatgatttcccacattcattacattcatatggcctttctccagtgtgaactctctggtgttcaatgaggtgggacttgcccctaaataatttcctacactctctacactcataaggcctttctccagtgtggcttcgctgatgctgaatgaggttgccctttcgactaaaagatttcccacattctccacactcgtaaggtctttctccagtgtgacctcgctgatggttcctaaggtgtccctttcgactaaaagatttcccacattctccacactcataaggtcgttctctagtgtgaactcgatgatgttcagttagggtgcccttttgactaaaacattttccacattcttcacactcataaggtctttcactagtgtgacctcgttgatgttgaatgagattgcccttctgagtaaaacatttcccacattcttcacactcataaggtctttctccagtgtgaactcgttgatgtttaatgagagtaccattttgactaaaagatttcccacattctccacactcataaggtctttctccagtatgaactcgctgatgctgaacaaggctgcccttatgactaaaagatttcccacattctccacattcataaggtcttttcccagtgtgaactcgctgatgctgaacaaggctgcccttatgactaaaagatttcccacattctccacattcataaggtcttttcccagtgtgaactctctgatgattactgacgctatcatatttgctaaaggatttcccacattcccagcaataacattcctctctagagggaagtctctgctgttgaacaaatacgtgtttggtgctagaatgtttcatgcattctccacagctgtaatgagtatctccccactgaaagggagactcacactcaggtttgctgtttgacttctccccagtgtgagtggcctcctgcagcagtaatcctgagctgggcaaaaagtcctttccactctgaatgaagatagatgactcctctgacacatggaacttacacctcttcacaaacaatgcttcctcaacactgcttctatagggtttctctccaaggtactgattctggtgcggacggtttgaactatcatacaatttattcccccatgcctcacacctgtgcagtttctgcttgtgatgtgtcccctgatgatctgccaagtgcaaaatgtctcccaagatcgcgccacacatttcacaagagtgggccttcttgggagacacacctgccccaggagtgctgacctgagacactctttgtatagaaatgctcttcttagaaggtgcctcctcatcttctgatccacaccaacaacctgaaagcaagaaaatgctgatgaattcaagttaactctggtgggaaggcacagcccacccacaagcgtgtctgacaaaccaaggaattactccatggaaatatttgcaggaacagaaagttggcttcacgtggaagatgaggctatcattactgggctataaaggtcacagaatgtcggcctcatgatatgaagggcattagcatacatgcaacacagagaattgagccaaggtctacaattttttttttcttcttgagagacaggatctcactctgtcatccagcacagagtgcagtggcataatctctgtctcctgggctcaggtgatcctcccacctcagcctccacagtagctgggaccacaggcacaggccaatacgcccagctactttttgtagaggtggggtttcgccttgttgcccaggctggtctcaaactcccaggttcaagaaatccacccacatcggcctcccaaagtgctgggattacaggtgtaagccaatgcacctgctgtataactctttcctttgcaaaccacttgtctgcgggaaattatctgatgacatgttaatgctatatagaaggctatgtccaggcctaagaaaatgatttacaagacaacagctcttggtcagaacagtttaacaatttgcacacacttggccgggtgcggtggctcacacctgtaatcccagcactttgggaggccaaggtgggtggatcacgaggtcaggagatcgagaccatcctggctaacacagtgaaaccccgtctctactaaaaatacaaaaaaattagccgggcgtggtggcgggcgcctgtagtctcagctactcgggaggctgaggcaggagaatggcgtgaacccaggaggtggagcttgcagtgagctgagatcacgccactgtactccagcctgggcgacaaagagagactccatctcaaaaacaaaaacaaaaaccaaaaacaaaacacaatttgtacacacttgctaatacacaatgtgtatgccagtatcggacagcactctagaagtaaacatgagaaaataaatgggtgagatgtggagtccagagactggaagattcgttgggggatggacatcagagtacaagtgacaaggtgtacaactgacaaatctgatgctctcaagaatggaaaggaaaagacagaaacagtgcctactggccacaaaaatactagtcaaatagaataggtttctgatacgatttgaagaaaatctcgaactcatgccctcccaccaggtgccactcctcagtgacaggctccctctgagaacatcaggctgagcctggattcaactgcctcttctgcagcactgaggactctccatcccaccatcacaatgatgaagtacatggaacctggatgatgtaagtactaaggcaaagatagggcagaactggggcaactagcctctgtggcagcaaacagtgatgagccaggaaggccatttccacctgattaaattgaaatgctggctggtcacaaaggccacatcactggactccctatcctcttcctcctgccaatatgtgctggtagttttcagcaacagtggttcaaaacatgacaacacacaggaaaggaaactaattactaaaaacagaatttcttttttttttttttgagacggagtcttgctctgttgctcaggctggagtgcagtggtgcgatctcagctcactgcaagctccgcctcccaggttcacaccattctcctgcctcagcctccctagtagctgggactacaggcgcccgccaccacgcccagctaatttttttgtattttttagtggagacagggtttcaccttgttagccaggatggtctccatctcctgacctcgtgatccacccgcctcggcctcccaaagtgctgggattacaggcgtgagccaccgcacccggcctaaaaacagaatttctaaggagggtcttgcctttggtctatgtaggcagtgacaacgggagtgatggcaattcctgccacaggcaggcatcaagtaatgtcagctaaaggaaggaagtagaacctggacacacaggagtctcagatctggacaaagtcaaacagcaacacagggacatgcaaggtgaaatgcattagattgactacgagacacctgactctaactccttccctgagagtctgcagcaaagcacgtattgggactgctcaaggagaaaaggcagtacacaaacctcagacctaccaaccacaaaacctacccagagaagtggagaaggaagctgtgcccatggtcctgacatgataaaagacagtcttgccaatgggagaaaaggggaagggcagagatctattcaggaaatagggtagggtgtgaggaacttacccagggaggatataagtacccagttctccagcatcacgtcatggtaaaggcatctctgaacctcactaaggagactccactcctcctgggaaaagttcacagccacatcttcaaatgccacagtgccctgctatgatggtgacagatgaaaccacaaacagctcctatgctgaggtaccacaatccacctctcccacacccccacccccttgcccatcctcctcccaagatcctcagcacagaggagaaactagtccactggtgcctttgtctcttcgtgggcccactggtcactcagtatagccatcagcaattaagaagtaggggaaaaatagggatctatgctgtgcttgtttttttgtttttctgagacagagtctcgctctgtcacccaggctggagtgcagtggcatgacctcagctcactgcaacctctgcctcctgggttcaagcaattctctgcctcagccgcccgagtagctgggattacaggcacccaccaccacttctggctcatttttgtatttttagtagagacagggtttcaccatcttggccaggctggtcttgaactcctgacctcgtgatccacccgcctcagcctcccaaagtgttgggattataggcgtgagccaccgtgcccggctatgctgtactcttaacataaaagggtccaccccctcctgacagctaatgcctgtggtatatccgagctcacataaagcccagtgcagttgcctgggtccattagacgtactccctctctaaatacacatccttcttttttttctgagatggagtttcgctcttgttgcccagacaagagtgcggtggcgggatctcagctcactgcaacctccacctcccaggttcaagcaattttcctgcctcagcctcccaagtaactgggattacaggcacccaccaccacacctggctaatttttgtatttttagtagaaatggggtttcaccatgttggctaggctggtctcaaactcctgatctcaggtgatccacccacctcggcctcccatagtgctgggattataggcataagccaccacgcccggccttacacatcattctttagatagcacaggcacatgtcacggccagcccaacatgacatcccccaaccatcagcttcttttgagccttaacacaaattacagttttggtttcttttagtcaggttctcctttggtcgcctaagctggaggggagtagtgtgatcatggctcatggaaagttcaaaccccttagccccaggcctcagccttctgtggagatgggatcttacgtatgtgcaacatcaaccactttcttttaagagatggggtgttgctaagttgcccaggctgatctcaaactcctggcctcaagcaatcctcccacctcagcctcccaaagtgctgggattacagcatgagccttcaagcctggccaacaaagtattttaatccccttcttttccttctactgctctgagtgggattctccccttagggttatagtgttggggaaacaattgacacctgagactgtacatatgccatccacagcaatttcaaaatcaaataactcacagcctggcagagagggccacatgggggttgcactgtggacaacaaatggaaaccagggacagtgttatgcacactttgtaggatgaagagggtgtgatagcccctgatttctcaggagggtgccactgacttgcttaaataattctgagtagaaatggaattgaaacccagtacaaagtataataaccagaaactgtgcctgatcccttaatgaaaagggttgttaggccaggatacattatccaatagaacagagtgggaaggggatttgtgctcaggccatttgaggtcatacagtatcaccacacaccaacgttgcacatcacattggcctttcattttcggccttatgccacaatgtggctgacagaattcagagtatgcttggcaaattcaaacaggatccaatattaccacagaattctcatggctcccaatagcaatgcagtcccaagtcattctatgaaggccttcttgcatggctccacatccccacagaaccaggtggggctttagatatccatggccctattccacttctgtgttgcacttggtgacccctctacaatgacgactttcctctgtccacctagagtcatttaaatcccactcccttgttatggagaatggtctaagaaaagtggaaaacaaaagaaaaaaataaataaaatcccagcccatcagctgtccaccccaggcccaatgtctgtcacagataaccaaatttaccctgagcatgtatccaccaggccgaatgaaaacccccaagcaccaacaaagttttctcaaaatcttggtgagtccacagagtggtgaataagtaccagccttggcccaagtgtcatcttccttcaattatttctatgcttctgcttacatctcttatctattctacccttggaaagcctatgccccctgacaaaccatgttgtctgacataccctatcttcatgagcccttgcctccttctcctgtggcaatgtcagccagggacccaagcaagaaattcagccctcagcctgcaaccaccccttcctggcccccacaaaagatttaccatgaaaatttgaagtgtgtcaatgtcataatggaggctaaactatctcagactcttaacatggtcaaaacaacattcttcacatccccaatgaatattatacctactatgtgctcatctcagttgatgcagcttccatcactgcagatgctaagaccaaaaacctggtggtcatacctgattcccctttcatgccctcacagtctattagaaaatctagttaccgaccgggcttggtggctcacgcctgtaatcccagcactttgggaggccgagacgggtagatcacgaggtcaggagatcaagaccatctggctaacacggtgaaaccccatctctactaaaaatattaaaaattagccgggcatggccgggcttggtggctcatgcctgtaatcccagcactttgggaggccgaggccgatggatcacgaggtcaggagattgagactatcctggctaacacagtgaaaccgtctctactaaaaaatccaaaaaattagctgagcatggtgacgggcgcctgtagtcccagctactcgggaggttgaggcaggagaatggcgtgaacccgggaggcagagcttgcaatgagccaagatcgtgccactgcactccagcctgggcgatagagcgagactcccgctcaaaaaaaaaaggaaaatctagttgccattttacaaactgtgaatcttgaatccagccacagctccttactcattaatatggtccagtaaccctcacctgcattatggcaggagtttaaactctgatcctccttcctcctccctcaaacacagtgtgttctcttctttgcagccagatgatgcctgcagacaaatgggactgtggtaacatcacctcctcgccgccctcttgcctccccaccgaatttttacctctaagcatttcatgacctggtaccaactctgtagttaaccttcaaagtatgtttacatgggttgacagaaatgggaatacctccatacatcctgtgtcatggacttaggattctgggtttagggtttctccagtgttctcagatcaaaggactgaaaaaatggcaagtaagagtcccaggacatcacaagctagagaacatgtgaatggggaataaggccagtgagggaatggaacaccctctaattccctctgtgggttcctttttttgagccagagtttcgctcttgttgcccaggccggagtgcaatggctcaccgcaacctctgcctcccgagttcaagcaattctcctgccttagcctctgagtagctgggattacagtcatgcggcatcaccacgcctggctaattttgtatttttgttagagacggggtttctccatgttggtcaggctggtctcgaactcccgacctcaggtgatccgcccgcctcggcctcccaaagtgctgggattacaggtgggagccaccttgcccgaccccctcagtgggttctttacgtgcttttgtagccaggagtgtctgaggggaaagcagacgttacaaaggggatctgataagctcaggtctccttgaaccttttcttatcgctggagccaggtgacctcagactggttgacctgcgtgtctcagtgcaaaatgtcatctctaccacctatgtgatctatcaacaaaggagtcaacctcccagaaccctaaggtcctcatctcctctactatgttcttcctttggcctttgggaaaccttaaaagcctggacttggatcgcatccctcctttcttcgaaactctccatggcttctagcgtcttcacagcgaatacacagcccccagcctgctcttccaggagaagcttcgcctcacacgttgttccctacaggcgcctgtggaccccaggttccatcctcccgggtctgtcctccaggccatagcccgcgccggtccctgtgcctgtcgctctccccaccgcatcccacaggtgtcagaaacaaggacctctcccgcgaacgcctcagtgtcccgacgccgggtccgggctgcagacctgtgaacagtcgccgctctctcgctgcttcaggattcgggttaggatgaggtgacctgagggcagggaaggcacaattacctgagccgggagcctcagcgcggccgccgccatcccgagtacgcggggaaagcactgccgggagcggcgggcgccgttacggggcctaagatctgcctctgtgcagcaagaaggactcttcaccttctgggttcagacaccgcggttcggacccatagctccagcgcctctcacctcacaaaccgcagaaacacacccaacattaaccaaaatggtcgctaccagagaacgctgagaatcccgccactacgttacgtgcgcacacagaaacgcctttattctgagcccttactggttctgttgcgctgtcattcaatgtagagctttctgggtaatgtagttccccaggttccaaggtagtaaagctgccgcttcccaaaggcgcttctgcagggaagtcccagccctacctcagggggttcattaaagcgcgtacccttttagggcagaggatggtctcgcccctccttagaggccatattgagattcctggggaatccctgtttgtaactgaccacctaagtgtttgcaaaaatattaattcacatttctgtaaattcaagctcccaggcgctaaaaatactgtgaaggcccccaaaggctacaaatccaaattcgtgtatcactttatacaatcgtttagacacagaatgcttgcactggaagcagaggctgataaacattactctgttataattcacatgaatgcactcttgttaccggatagaatgtcttggctgtgagttgtccagttgttggcgcattgaacaaagaagtgaacaaaacacacaaaaaaagcaacgaaagaacggaccaatgaaagcgcagatttattgaggggaaagtacactccacagaagtggaatgtaggtgtgggagcaggcgaccaagcggctcaagaaccccgattacaatgttttttagggttttattaggttggtgcaaaagtaattgcggtttttgccatgaataagctagaattttataataccccaagagttctttaaaggcctccaatcctatgaaggactggtgcacaaccaatcagaggctgaagtggagacttctgtcttgttaccacaggagtgaggacgtggcctgtgtgctgcctcatcttgcctagaactagctgcacctgctgttcttttgcttatgccttcattcttggttaccctaattccctattctcctgcctcactctgaggcattagagttggtttttcagtctgccagggacaaaagagaactaatccagataggaccatgccaaggaagatagaggagaggctaaagaaagagtacaaaggtcaatcagtcgttcccatggaaaaacaactctcctgcttatatagtcaattattgtgtccaattcattcagcaaaacatttattcatgtaatatcccttacttggtattctaacttatattttcaactcattttaggaacttgaagtcagtctcaggtaaagaacaatgaaagagaaatctcagcttggtattggtaatggtggtgataatctccacctggagacactaggcgtatgttaaattatcgagcttgttatctttcctgggaagtgattatcatttgtttctcttgtgacagcggggagtgttctgcatgaggaactaatatgataccagaaaaacaggtgaaatgccagttacagaaacttattaccaacgactatctaataactgcgatgacagaaataggtcaattgaaacatgagtggatggtgaaaaaaatttacacttcacagaagtttttctttctttttttttttttttttttttgagacaaagtctcgttctgtcccagactggagtgcagtggcgccatcttggctcactgcaacctccacctcccgggttcaagcgattctcctgcctcagtctcccaagtagctgggataacagatgcctgccaccacgcccagctaatttttgtatttttagtagagacaaggtttcaccatgttggccagactggtctcaaactcttgacctctgacctgcctgcctccttctcccacaatgctgacattacaggcataagtcactgctcccagctgactttacaggtgtttgtttgtttgtttgtttgttttgagaaggagtttcactcttgttgtccaggctggagtacaatggcacagtttcagctcactgcaacctcctcctcctgggtcaagcaattcattctcctgcctcagcctcccaagtagctgggattacaggtgcctgccaccacactcagctaatttttgtattttcagtagacacaaggtttcaccattttggccaggctggccgcaaactcctcacctcaggtgatccacccgaggtggcctcccaaagtgctgggactacaggtgtgagccacctcgcccggcccagaagttttaacagtgatgtctacgaagagatggaattaaggtcagcatgtgattaaaaatgtcccccttgttggttttgtcattgagatttttttttctttattaaaaacattgaacaataccaaggtggagaaaaattgtgcctgttcacctacctacttgggaggcttagagggaggatcacttctgcaaaggagtttgaggccagcctgggcagcagagcaagactctgtctccaaataaataatttaatgaataagtaaaaacagaaggtgaaatctgcagtatagtattatcctcatagaattgtgtctccctttcttcattattctgtgtgtcaattatgttacaagtttttcatcttataggaaaaaagtcatagattctatacacatctgtactttttctcacttagcaatatggtttgaacaatgaaaagcttctttttcacttcacatttgaaatctgcttatctccacattctatttttttctcccctttttgagacagcgtctcactctgttgccaaggctgaagcgcagtggcatgatcaaggctcaactgcagtctcaacctctcaggctcaagtgatcctcccatctcagcattcaggagtaattgggactataggcatgcaccaccacaaccagctaatttttgagagatgtggttttgccatgttgcccaggctggtatcaaactcctgagttcaagcaatcctcctgcctcggcctccctaagtgctggcattataggattcggccactacacctggcctattcatctttttctgatgtagaacccactcagtgacagtgtaatcaagaatcaagaaagaggccagatgcagtggccatgcctgcaatcccagcactttgggagcctaaggtgggcagatcacttgaggtcaggagtttgagaccagcctagccaacatggcaaaaacccgtctctactaaaaatacaaaaattaggtgggtgtggtggcgcacatctgtaatcccagctactcgggaggctgaggcaggagaattgcttgaacccgggaggcagaggttgcagtgagctgaaatcgtgccactgcactccagcgtggacaacagagcaactccgtctcaaaaaaaaatagagccagaatacaatacacaagcaactgaagtatttcaacagcaaagaaaccctcaaacaatccaatttaaaaatgtcaaacgatctgaataggcatttttcaaaagacaacatacaaacggtcaaaaatatattaaaacacactcatcactatctgggaaatgcaaatcaaaaccgcaatgaggtatcactctccccgtttaggataattattatcaaaaagacaaaaacagacgctggcaaggatgcagagaaaagggaactaatggccaggtgcggtggctcacatctgtaatcccagcactttgggaggccgagctgggtggatcacgaggtcaggagttcgagactgcctgaccaacgtggtgaaaccctgtctctactaaaaatgcaaaaattagccaggcgtggtggtgcgtgcctataatcccagctactcaggagactgaggcaggagaatagcttgaacccgggagacggaggttgcagtgagccaagatcatgccactgcactccagcctgggcgacagagaaagactccatctcaaaaaaaaaaaaaaacccaacaaaatacaagaaaagggaactcatgcactggtggtgcaaatgcaaaccagtacagccattatggagaacagtattgaggtccctctaaaaactacaaatatgccaggcgcgatggctcacgcctgtaatcccagcactttgggaggctgaggcaggcggatcacgaggtcaggagttcgagaacaccctaaccaacatggtgaaaccccgtctcttctaaaaatacaaaaattagcaggggtggtggcacgcacctgtaatcccagctactcaggaggctgaggcaggagaattgcttgaacctgggaggcggaggttgcagtgagccaagatcacaccactgcactccagcctggataacagagtgagactctgtctcaaaaaacaaaacaaaacaaaacaaaaaactacaaacacaactaccatatcatccagcaatccccctactgggaatttatccaaaggaaagaaaatcatcacattggagacacatctacaccccgtttactgcagcactattcacaatagccaaaatatggaatcaacctagatgtccaacaacagataaatggataaagaaaatgtggtttatacacacaaaggaatactattcaaagaacagaatgaaatcctatcacctgaggcaacatggatggaaatggaggacattatttaagtgaaataagccaggaacataaacatgcacattcccactcatatgtggaagctttaaaaaaaaaaaaaaaaagctgggtgcggtggctcacgcctgtaatcccagcactttgggaggctgaggcgggtggatcacctgaggtcgggagttcaagactagcctgaccaacatggagaaaccctgtctctactaaaaatacaaaattagccggggtggtggtgcatgcctgtaatcccagctactcaggaggctgaggcaggagaatcgcttgaacccaggaggcagaggctgcggtgagccaagatcatgccactgcactccagcctgggcaaaaagagtgaaactccatctcaaaaaaaaaaaaaaaaaaaaaaaaaaaaaaagcctgggagacaaagcaagactgtcccccacccccacaaaaaaaagttgatctcttagaagtaaaaagtagaacagaggatactagaggctgggaagggtagtgggtaggcaggaatagacaaagattggttacaagctacaaaattacaactagacaggaggaataagttctagtgttctataccactacaggagaactaaagttaataatatataatttcaagttgttaggagaatggcaattgagactgactgttcccaatataaaggaatgacgaatgtttgaggtgatggatatgctaattactctgatcactctaagttataggtatcaaaacatcactatgtactccaggaacatgtacaattataatttgtccatttaaacacaaagaatttttttaaaaaaagaaaccatttggttttctgtgtggatatgagacaaagtagtatgtacacatataaacttatttgtataaaacaaaattcagagaacatatactaaatataaaacatggttattgaaaatacgtatttatttatttatgtctgtgaattttgcagggacacttctcagtccgtaacagccctatgtgtgttacctaacctttatcccttgtgaacgttctgatgttttaggaggttggagttgaaggtaaaaaattttccacagtcactacactcataaggcctttccccactgtgaattcgctggtgattagtgaggttagagctctggctaaaggattttccacattcactgcattcataaggcctttctccggtatgaactcttcggtgtttaacgaggctagagtggttactaaaggatttccaacactcactgcactcataaggcctttctccggtgtgacttctcctatgtctaatgaggctggagctctggctaaaaaacttcccacattcattgcactcataaggcctttctccagtgtgaactctctggtgttgaaggagcgtagagctatgagtaaatgatttcccacactccccacattcataaggccttgctccagtatgaactttccagtgtgagatgaggtaggatttacaggtaaaggattttccacattcactgcactcatatggcctttctcctgtgtgaactctctcatgtacaatgaggtcaaatttcctgctaaataattttccacattcatgacattcatgagatcttactccagtatgaactctctggtgttggaagaaacgagatctataagtaaacaatttcccacattcactacactcataaggcccttctccaatgtgaagtctccggtgtttaatgaggtgacagctctggctaaaggatttcccacattcactgcacatataaggccttgtaccagtgtgaactctctggtgtgtaataaggctagaactatggataaaagatttcccacattcactgcactcataaggcctcattccagtatgaattctctggtgtgtaatgaggctagagctatggctaaaggatttcccacattcactgcacttgtaaggcctttctccagtatgaactctctgatgtataagaaggtcatacttcctgttaaataattttccacattcatcacattgatgaggtcttactccagtgtgaattcttcggtgcgtaataaggctagagctttgcctataggatttcccacattctccacatgtataaggcttttctgaagtgtgaactctcaaatgatcactgaggctacagcttgtgctaaaagatttcccacattcactgcacatgtaagatctttccctaatgaggtctccctggtgctgaacacgtacatgtttgtagctgaaagctttcacacattctccccagttgtaatgattttttacactgtgaaaggccactgcactcttggttctgtttgacttctttctggtgtgagcagcctgttgctgaagaaatcttgatctcaccaggaaatccttcccaacctccttgcaagtgaagggcttcccagatacttcaaatgtgcagctgctcaaaaacatgtctctgcccccattgcttctgaagtgtttctgtccaacatgctgcttctggtgctgatgaaggtatgcagtaaattgtaattgtttcctacatgccccgtctgtatacagtttctgaccatggtgtgttccttggtgttcaaccaagtgcaaaatctgtctcaagactgggccacatatctcacaggggttggtcttctggggagaaggaagggccttaggaatcctaacctgtgacacccgctgtggagaagtgctctgctgataaggtgcctcctcatcccctgctccagaaccacctgaaagaaagaaaatgctggtgaagagcatgctgactttagtggagtggaggtagcccacagacaaatgtgcatccaacaaacccaggaactgagtccatggggttgttttcaggaccaaggtgttgggttcaagttgaagatagggctgcctagcagaactgggcctctaaagatcacagaactgggaagggctcatgagttaaaaaacacagccatgggatgagaaacatggagaagaggcaggatatacaactcattcctctagaacaattttcagtgagatctgctgtcctgctaacacatgcattgtgtacaggtatgtgtccaggcccaagaaaatgtgacaacaaaatagcggctgacatacgtggacacctcataacatattatgtagaggccaacactgaagagcactgcagataaggcagtgagaaaaatgggtgaaacatggagtccagagatgtggggattaaccccaggctggaagtaagagacgtagtaaccaggtggacagctgacaagcaagctaagtatcaagaatgggaaagaaaaggcagtaatgaggtttggccccaaatgtcattagcaccaaaatattagtcaaacaggatatgtttctggtatgatgtgaacataacccttatagaatgtcctcctttaggtgttagtccctagggccaggctccctctgagtccatcttgctgtggggaatcacagccatcctcagaaccacagggcctgtccatctgacccctacaatcaagaacacggaacttggaatatgcaagcacccaagaccagcccagaatgactctgcacatgatagcctacaggaaaaaaaataataatacaaggagaaattcagaggaggattttgcaagagccactcgtagtccacataagtggtgacaatgtcagtgatgataattgctggcagaggcaggcatgaggaagtgtcccctagaggaaggaagtagaacctgggccttgaggagcctcgaatctggacaatgtcacctggccaggagaggcaaacgaggtgagatccatgaggccgactataagaagcctaactctgaatctttccacatgaaagggaagcaggtgttgcttgctcaaggagaaaagcaggcaacatacaaccttagccctaccaaccgcagcacctgcccaggaacaggaagctgtgtcaatagtcctcttgtgaagacacatctgactctggggaaagggtaagagcaaaggctagctcggggcatagaggtgggtgtgaggaccttacccagggaggttgtaagtgtcaagttctccagcatcacatcgtggtacaggcatttctgagcctcatcaagaagaccccactccttccaggagaagtaaacagccacgtcctcaaaggtcacaatgccctgccaggatggggacacatgaaaccacaaacggttcctcctctcaggatccataatccttcccctcacacatttaccccatgctcatcctctttccaagctctccaagctccccagctcagaggagaaagcagtcagctggtgctgttgtctcctaatggggctcttggtcactggttgcagccatcagtaacaagaggcaggtgaacaaatacatgtatctaagctgtgggcgtggcataagggcaaccactccttcctgacaagcattcctctcatatgaccaaggtcatgtaagtctcaatcaggacactggggccatcaggcacactccctctccaagtgcatatcattcattacactgcacatacctcaggtctccagatcccactgccacatgaccatgaccaccactacgtcctataccacaggcaaatcctggcttccccacatgctacctgagtgaaagagtagataacctgggccgggtgcagtggctcatgcctgtaatcccagcactttgggaggccgaggtgggcggatcacgaggtcaagagatggagaccatcctggctaacagggtgaaaccccatctctactaaaaatacaaaagatcagccaggcgtggtggcacacggctgtagtaccagctactcaggaggctgaggcaggagaatcactagaacccaggaggtggagaggtggaggttgcaatgagccgagatcacgccactgcactccagcgtggtgacacagcgagactgcgtctcaaagaacaaaaaaaaagagtggataaccaacagccaaatataagacacgtgacattggacaaatgagatcaacagtttattaattttttttttttttttgagacgaaatcttgctctgtcgcccaggctggagtgcagtggggcaagctccacctcctgggttcatgccattctcctaccttagcctcccaagtagctgggactacaggcacccgccatcacgcctggctaattttttatatttttagtagagaaggggtttcaccgtgttagccaggatggtcttgatctcctgaccttgtgagctgcccgcctcggcctcccaaagtgctgggattacaggcgtgagccaccacgcctggctgaacagcttattaattaaagacaaatactcatagcctgtgaaagaataccacactccacacagggccatacggaggtagtactccagaaaagagtaacaaccaggtgctgtagaatgtaagttttgtagcatcaagatggagaagctccactggtccccagaggaggggactggcttgtttgaataactcaaaaaattgatagggaactgaaacccactacaaagtaataagcaggaactgttctggttccctggataagaatggataagaagggttcatttggctaagagagcttattcatgggagcaaagtgggaaggggaatttgttctcaggccatctaaggctgtatcgttttcatcagatgtcaaggcgacatatcatactgggccttaatttccggccttataccgcaacttggcaggcagcatccagagtgtggatataaacaggatccaaaatcccagacttcccacagcttacactagtggaagcagcctcaaaaatttctttgaaggcctccctgccaggctgtattccttgcctcagacatagccacacagaaccacaggtgaatcacagataaccatggccctattccacttctgtgctgcacttaccatccccttgagagtcatatatccacctaaagctcatttaaatcccagcctcactggtcgttcatctcacacacaatgactctcacaaatgaccacatgacactaacttaatcttccagcctgaatgaaacacccaggccccatcaagttatcacaaaatcctggatacccataaagtggtgaataagcacgagttttggcctgagtgtcctatgcgtttgcatccatctcatgtccattcttctcttgggagccgtggccactgccaaactacactgtcttttacataccttgccttcatgaccacttactctatcatcatcctcccagtcttggcccactaacagctttacaaccaaaacctggagcttgccccgcctaactgtgacccacagctcactaaccttggtgcgcacaacagccacatcttgaatatctgcaccctgaaccactccctagatttcaagaccggcacgttcatctgcccacttaacgcctccatttagtaggctctgaaagatctgactcttagcatggcataaacaaacctgatatccctagtgaatattactcctattgccaatttgttcatcttagttgatgaaacttctttccctacagctgctaataccaaaaaccctggagtcttctctgaaccctctgtttcactccctcaccacctacattatgtaatttagttgtcccttttgaaaccacacatccggaatctaaccacatctcctaaatcacgatcctgggccagtaaccctcacttggactagtctaccctgattttccttcctcctccctcaaccccccagtttgtgccccactgtgcacacagatgaagcctgtgaagaccttggtaaattacctcttttttctgattcaaacttgctattacctcctgaaaacacactcaacttctcaggcagccactgcagtcctgacgcctatcctcctgttctttgcttcccaccagaaagcaaggagacttgtggcttcataaatgcacccagctccgtactgcacctaagcatttgcacatcttgtacctttctggaaaaactttccacacccgttcacatggctgccagaaattggaacaactctatataccggctaacatggacataggaccctgggcttggggttcacccaaggtcttcagaactaagggctgggggaatggcactccacaacccagagaacctgtgggtgggagttagggctagtgagagactgggaaaccctccccttcctggcgtagatttcataaccctttacagccaagggaaacgtagaaagagccaggcctcagagaagagcatctatggcggtattagatgggctcaagccaccccgtagccccatgcctggccttggagccgggtgccctcgcaatggctgtgtcacctctgtgccccagggctcagtggcgcctctcatcaggggctccttgccagtcgcgccctcccttccctagcacaccaggtgttggaaacgggagcccctccggcgagcccccgtgtcctgtcctgggcagcagggccgcgagcaagcgccctcgggggtgctaggactagcgtggggagggcggggaaggcccagaggacgcggcacatacctgggccggggccgtcagctcggccgccgccatctgactctgtgagcggagcggggccagagaggatgtccttattccgggccgggcctgggtaccctgggcgccgccgagcctcagccacgcctctgtgcagcggggaagactcctctcgcgccttctcagtcagtcacggatgatgctgacccagcgctccggggctttctaccaagtaatcagtccagacaaatgccaaaacgaccgccacaaggaggacaacggaagtcccgccgcgaccgcgcgtgcgcttacggaaacaccacctttcggaggcctcattggctgaaggtcgccgtcgcccaacgcaggccattctgggtaatgttcccacaggcgcacggcgggagagtgagggtcgcctccacctccttccggaagtaaaggccaaacccctgtagggggcgctgggaaatggacactccaggttggggcggaggcgaggcttcgttctttcttaaaggagacgtacccaggtttctaccgattgctgtctgccagtgtttgtttggagacgtgtcatttcatgtgttcccagaggcacatatccagatgcacatattattacatacagtcagtcagtcacaaaatatatccactggttgagaaagcaaataaatatgactatgttgcggccgggcgcggtggctcacgcctgtaattccagcactttgggaggtcgaggcgggcggatcacgaggtcaggagatcgagaccatcctggctaactcagcgaaaccccgtctctaaaatacaaaaaataccacaaaaaaaaaaaaaaaaagaaaaattagctgggtgtggtggcgggcgcctgtagtccccagctactccggaggctgaggcaggaaaatagcttgaacccgggaggcagagcttgcagtgagccgagatcgcgccactgcactccagcctgggggaaagagcgagccactgtctcaaaaaaaaaaaaaaaaaaaaaaaaaaaaaaagactatgttgcaattcaaacgcatgcactcaagcactggagtcagttttctcagtctctgtatgtttgattagggacaagaaaaaaaacactccacacaggttcatgacaaagaggatgaaggtgggatgcggaggcaccctgcagcagcaggacataagtagatccctgtctctgggtccctctcgtgcctgtgtagtcaaacattgtgtccaattcactaagcaacacttgcatgaatctaatctcactttctccatgcctttatattcacttctttttaataatttgacatcaagctcagaaagagaacaacaaaaggaatggtattttgaaaaggcatgatggctagctagagcattaacaggtggaacaaagggtgctctgaatcccaaatgtagggtgtatcttaaattcaagatctcttctcaacgctgaaatgattatctttgcccccattagttacgctcttgttgcccaggctggagtgcaatggtgcgatctcggctcaccacaacctctgtctcccgggttcaagcgattctcctgcctcagcttcccaagtagctggaattacaggcgcccgccaccgtacccggctaatcttttttttttttttttttttttgtatttgtatttttagtagagacggagtttcgccatattggccaggctggtctcgaactcctgacctcaggtgatccacccacctcggcctcccaaagtgctgggattacaggcgtgagccactgtgcccggccctttgcccccattattatagggctgttctgcataaaaaattgatacgatatcagaaaaagaattgtaaaatacaaattacagaaagctactaataatgggtgtcgcttcgccagccagaaacctctgtggtcgcgcctctgcttgagttttgctcacacccgctgggcttgttccacccactcggcccagcaggctgcacctggatcccacacctaccaagggcgagccaggcgcggagccgcaaggggtgtgtgagcgagcaagtgaagggtccagccagtgcacacagccaggcacgctggctgctgcggcggggcgggcagctccaggcgctggcacaggcgccggctccttgcaagtctgcgactggaccagacatactgcaggcggcttctgctgcaggcaccagcatctagacgagggaaaaatggtggcgccggaaagctcggagacaccaagaacagcagaaccccaaagagggtgttgcagcatgtcacagccctggctccggagtctcgaggcctgggctcccggaagagccacagctcttctctccttcccgttgcttgcagcctggcaagcggggaggtgtgttttgggtggggtgtgttttcagcttgtttgtgatatagctctttcagtcccgctgccctgctctggctcgctgctgcttcccatcgtggggggcggccacccagtgctggctgagggcaggagggctatagtgttacagctctggctcggggaatcccaaagtctgggcctccagaagagtcgccatttttcactcatgcagcccagaagcatggctactcagccaggaatgtgttacagcccctttctctcctgctgttcgttaggtcccaagttcttgtcccccaagttcttatcccacgtccaggaagaatgaggttatgcagacaactggagggtgagcaaggcagagaagggttttattggacaacccaacagccctcaggaaacctgaagggagtagctcacacctgcatacagatagtctccgatgtctgagtctggctgagtctacaggttttttatgggctcagaatggagaaagtgtgtgctcattggtccatgggtggtaggaagtgcatgctgattggcccatgggcagtcatgggcgggcctgggaaaaacaccataccattggccgaaaggcgtcaaggaatttctctctctgggtcacagactccacctggaactggcagcgtggcctccaggcttcaggccattcgtggcttgaaggtggggtttcacagaaaacccaccccttcccacgtaggaacctgtctgcctttcatggccatcaacatgctgtccatgacgcccaggctgtccatgctgaaggttgcccgcaggcctgccccgagccactctcagccgcccccctcccaccacccggcctccttcccatgcttcttggtgcccaaagtttcagcctcaaaagcagtttctggaggaaatcgagatggtggggggctggcatgtcgtcactgccccgagggcacacacatttggctgggttgtgatagcgcccaggtttggctatcttgacatgtccacaactttgctctgccgtggagcaggtgctgagagtggggagaggccagggagtgggagcaggcacttctgggcctgtgggaaaagggtgcttcccaggtccccaagagtgcagggatgccctgtctggagccacgactaggtggctgcagctgcgcctgggagcacagggctcccgtcctgacaactcggtatggctcgaggctcccactgggatcacctgttcccagtccccgtgggctccacggagcatgcagccctggccgtgcctccccatttgcagccggcatcatcacagcggcccctccagatcagccactgctgccattataatgactatgtagtcattcaaaaatggtggcagaatcgtgtttgggaaatatcggatggtgaaaaaagtgaaggtctcacagaactcttttgttttggtttttgtttgttttttgagacggagtttcgctcaaaacggagtttttgagtccaaggatgtgaacttggactgggaggtgtgcaggaggggtgctgagtactaggtctgcgtgtcttgttctggtggctgtctcaagccatggtccacctggagtgtgggctagctgcatctcagtaatggcctggtggttgactaactgccttgaagtaatctctggaattttgcagataggtccctatgcctaccaagtctgtctcaagattatccccaggaacttctaagtaagcacataattagatactagcatacaattagacaaatgtgcatggtctaagggagtgtatggtgagaagcggtggacatggtatttcaaagaaagtacatttcaaggctgtattttaagactaatgagaagaaaagattctgcagtaaggttcaaggttatatcacaagactagggaaaaatgagaaaaaggaaaaaaactttttcaggccaggctgttcagttacaaaactagttttagagttgcagtgtgtcctgtcagcagccattaaataaaacttgtttcaagttacagcagggagtttcagcagccaggcttctggagaattacatttttggatcagggttatatgccctgagtgctttttttcccacagctctttcaactctgttttaggtgggtatgacaagaatgacccaattcatatgatcaactttcacacaattaatagggatcccttctaaatttgctaaatctgcaggatttttgagtttcgactggggggaaaacccaccaaatctcaaatcaatacatgtttattttcctaatacaaaacaaaatgttgttttctattatttatgtactatcataaagtaggatgtgaaaaatctttgtcagagacatggaggaaatttcaatgtgtattaataagcaaagaagccattctgaaaaggctacatagtgtgattccagctctatgactttcttttcttttcattcttttttttttttttttttttttttgagacagggtctcactctgtcacccaggctggagtgcagtggtgcagtcaaagctcagtacaacctcaaccacctgagctcaagcgatccttccatctcagcctccagagtagctgggactacaggtgcacactatgcctggctaagttttgtattttttttgtagagatgggggtctatgttgcccaggctggtctcaaactcctgagttcaagtgatctgcccacctcagcctcccaaagtgctgggattacaggtgtgagccactgtgcctgaccaagcaggtgtattagttttctactcttgtgtaataagttaccgcaaagctattggtttaaaacaatacccacttattatctcacaattgcctaaagatagcttagccgagtatcttggtcttctgagagcctgactctcacaaggctataatcaaggtgttgaccaagcctgcaatttcttccaaggctcggagccttctttcaaactcacatagttgttggcaaaattcagtgtcttgttgcaagaataaggttcctgcttttttttttttttttttttgagatggagttttgctcttgttgcccaggctggagtgcaatggggcgatctctgctcactgcaacctccgcctcctgggttcaagacattctcctgcttcagcctcctgagtagctgggattacaggcatgcaccaccaagcctggctaatttttgtgtttttaatagagatggggttcctcagtgttggtcaggctggtctcaaactcctgacctcgtgatccgcccgcctcagccttccaaagtgctgggatcacaggcgtgagccactgtgcccggccgtcttgttttattttaatggctgatctatgtaatcacggaggccagtatgtacagacaagaaagggggagcttttattgcttctctcttcctccttggacaaagtcttgatatcacctccttcttggcctgagtgtactcttcagccacttgtgtgcttgcttgttctcagacctgtgggcctcagcctgggcagccaggagcttcttttgggccttttctgccttcagctcgtggacgtgctccatgaggatgtgctccatgagaatctgcttgttttgaacacatttgctttcaccttcaggtacaagctgggatacatttggtggtcaatcttcttaacttcatgggatcttctgagcagcccgtgcagaatcctcattctcctcatccaagttaccttctctggcattcaggcattggccataccctttagcttacctatgtccatgtactcacccttccagcaggccaaggcatttttccagcatcgagcccggaaatggacagtcacaggcttgtggatgttcagcctatctttgatcagcttctggatctgctgatgggaggtggcattggtgatttcactggtctccttggagtgcaattagaccttctccttgccacagcaaaggacatgagaggtgagcctcttctgaagcctgcgcatactcatggcttcggctgcagcagcagctaaaggaaagagctctgaggttcccagtttcttgtcggctgttgctgggggccatctcaactgctaggggcccgtggcgtggccctctcacagcaggaggatctcgctcccgtgtgctgaggcagtcttatagaacagtgaagggggggagtatcttattgccttggcctaatcacaagagtgacgtctgtcagattcacagcccccactcaatggaaggaaattaggcaactgagtgcactgaggggtgagaatcttggggccatcttataattctgcctcccattgcagtttttgctaatagacatctgcccacgaagatccatgttcttcccttccttgttcacttgatatttgctacaaagcagcccagtctgtccacgctggaggctaggtatggcatggcatgttcccagcagaactagaactggagcatgaaccatgctggctaccactgcctggaggaccatgcacagtctatagtccctggtggattccagagccaccaaggcatgcaggaggctcctccctgtcttccctctctctgggctgctcatctggaactcctgagctcaggtgatccgcccacctctgcctcccaaagtgctgggattacaggcatgagccaccatgcccagcctgggcacctcatctgatttaggaccctggaatagaattgctctgagaattatcaatgaaggaatagattttacccctgcatctgctggttccattgcccctcatccggctcccaggaaagctttgaattgtgggcaaaaccaggtggcactggcagagacattcttggggttggtgtctcccctaaaacacactgtgccttctagagaggttccctagaagtcgcgatctttgctgagaaatatccacacatgctttgccacattgtcaatcataggaacatgctgcccaacaaatatttgtggcatagtaaaatgtttttaaaagcagttgctatggattgaacgtatccccccccaactccccgccatcaattcatgtgtcctgatgtgatggtatttagaaacaggccttctggaggtgattaggtcatgaggatagagccctcatgcatgggattagtgcccttacaagacgagacagaaaagagcttcctctctctctcaggaataatggtgctcaggagaacccagccatactggcaccctgatcctagacttacaactcccagaactgtcggaaatacatgtttgttgtttaggccacacaatctgtggcagacaagctaactaaaactgcagtcttgcaggctagtgtctccctagttaggatttgatctcagagcctcaagggctgggcatggctcttgcctcaaggattgaagttgcagggagggacatggaggcctgtccaggacctgggagttgtgccttggtacagtgccctggccgctctgtcctgtgcccccggggctgcccatcccatgtgtgattcctactggctgcactgtgcaggcaggaccaagctgtcggcttgagaaatgctttgcactgtcccaatttctaatatacacactgacttttgccttctcacattgtctgttctaatttttaaaatttaatttaggaaagatggaaactgaaaggaagggttagaagacctgagtctgagttcagttcatcctcaacatagactaatttttttgtggttttttttttgtttttttttttgagacggagtctcactctgtcaccaggctggagtgcagtggctcgatctcggctcactgtaatctctgcctcccgggttcaagcgattctcctgcctcagcctcctgagtagctgggactacaggtgcccaccaccacgcccagctaattttttgtatttttagtagcgacagggtttcaccatgttggccaggatggtctcgatttcctgacctcgtgatccaccctcttcagcctcccaaagtgctgggattacaagcgtgagttaccatgcccggcccaggctaatgttttttttttaacagcttgactgagatttatttcatttagtgcaaagttcactcttttaaagtatgcagttcaggccaggagtggtggctcacatctgtaatcccagcactttgggaggctgaggtgggcagatcacttgaggtcaggagttcaagaccagactggccaatgtggtgaaaccctgtctccactaaaaatataaaaattagctgggcctggtggtggatgcctgtaatcccagctacttgggaggctgaggcaggagaattgcttgaacctggaaggcagagggccaggcatcgtggctcacgcctgtaatcccagcactttgggaggctgaggtgggaggatcatgaggtcaggagatcgagaccatcctggcgaacacgatgaaaccccatctctactaaaaatacaaaagaattagccaggcatggtggcaggcgccagtagtcccagctactcaggaggctgaggcaggagaatggtgtgaacccgggaggcggagcttgcagtgagctgagatcgcgccactgcactccagcctgggcaacagagcgagactccgtctcaaaaaaaaccaaaaaaacagaacctggaaggcagaggttgcagtgagtcgagatcgtgccactgcactccagcctgggtgacagagtgagggagactctgtctcaaaaaaataaaaaataataaaatatgcaatttagtgctttttgtatattcacaaagtttacaaccatcaccactatcaaattttctaacattttcttttttcttttcttcttttttttttttttttttttaagaccgagtctggctctgttgcccaggctggagggcagtggcacaatcttggctcactgcaacctccacctcctgggctcaagtcatcctctctcacctcagcctcccaagtagctgagactacaggctcatgccactatgccccactaatttttgtactttttgtgagacggggttttgccatgttgcccaggctgttctcaaactcctgagctcaagtgattcacctgcctcagcctcctaaagtgctgggattacaggcatgagccactgtgcccagcctctaacattttcattccccataaagaaacctcgtacccacaagcagtcttccccctcctgctgccccagctcctggaaccaccaatctactttctgcatctatacagtttcctattctggccatttttaaagaacagaatcacacaatatgtgtctggcttcttgctcttagcataatgtttttcagtttgtttatattgtagtgtgcgtaagaacttcactcttttttctttttcttttctttttcttttttttttttttttgagacagcctcggtctgtagcccaggctggagtgcagtggtgcgatctcgactcactgcaaactccgcctcccgggttcacgccattctcctgcctcagtctcatgagtagctgggatcacaggcatccgccaccacgcccagctaaatttttgtatttttagtagagacggggtttcaccatgttggccaggatggcctcgatcccctgacctcatgatctgcccccttggcctcccagagtgacttcattcttttttgttgctgaaaaatatttaattgtacagatagaccacattttgtttatccatttgttggttaatggacatttgggttgtttccaccttctggctcttatgaatggtgctgctaagaacattagtgtgcaggtttttgtgtgtacatgtgttttcagttctcttgcatgtacacctaggagtggacttgctgggtcatacagtaactctatgtttaactttctgaggaaccgtcagattgttttccaaaacagccgcaccgtttcactcactcttgcctctttgcattcccacagcccttggtgtccacttgctacctctggccgtgtttcttagctccttgcctgtgggcctgtttccctcaagagagctggaacctgacggcgatgagtgtgtatttcttttttgtgtggagacggggactcactatgttgtccaggctgctcttgaactcctggactcaagcaatctgcctgcctcatgctcccaaagtgttggaattacaggcatgagccatcatgactggcctggatgagtgtgttttacttattttatttaattattttatttatttattttatttaattaattaatttttgagacaggatcttgctctgtcaaccaggctggagtgcggtggcgcgatctcggctcactgcaaactccgcctcccggattcaagcgattctcctgcctcagcctcctgagtagctgggattacaggcgcatgccaccatgcctgactaatgatgagtgtgttttaatccggagtcatatttattttaacatcctcagtttcctcatgtgtacaaaggaaacaaggtatggagctgacaggtaatctcaccaggaaagttttgcttcatgaaagctattccctggctagtctgggagatggccccccaaaactacttgtgcggtatttctggtcaggagcaagagaagaaaatcctgacaagttctcttaacccttaacaaagttggattctattctattttccaattaagttataattattcatcaactatgagagccaataagcaagagttgctatatcatgtggctttattttctgggatacaggtctggcatttctttctttgatgtcctcttccataaggttctctgggagcaagccacgcccacaggctcagtctcccagcacccccatagtttctcctctgcctcagccggcacctctgtcgtctgcgttcacaagtcttccatttttccattatgtgacgcattctttgttttgttttctgttactgagttttgctcttccttcagtttcttcttaatatttttgcttctttttgatataataactaaaatgtagaaatgatgttattgagatagtaataagtgaggaataaaaatggagacaaaaggggtgagggaaaaagcctggaaaaatagaggtaccaacagtggaattttcagaggattcataatgaatgttatttgtctgacaaggatggtgaaaattaaattttaaaattattttcccatattttgtattcaagttgtataaatgcccagtaaaagaagaagaagaatgtagaaaatttataatccaatgtggtaaagagacattgggaaaatgttttctacaggttatgacaaagtcctctgcctcagtgagcatcagtgatctctcctgctgtggctgttctgcctctttctggctatgtctggagtttttagagagtgagtccatgtgaggatggttagtatgtctgaatcacacactacactctctatagttttctctctagaattttttaaacaggtacccacgaatctcagaacttctaggctgggctcagtggctcacacctataatcccagcactttgggaggccaagacgggaagatctcttaagcccaggagtttgtgaccaacctgggcaacatggtgaaaactgtctctactaaaaatacaaaaactagcccggcgcagtggctcatgcctgtaatcccaggactttgggaggctgaacagggcggatcacttgaagtcaagagttcgagaccagcctggccaacatggtgagaccccccatctctactaaaaatacaaaaataagacaggcgtggtggcatgtgcctgtaatcccagctactcgggaggctgaagcatgagaatcacttgaacccaggaggcggaggttacagtgaaccaagatcacaccactgcactccagcctgggcaacagagcgagactccatctcaaaaagaaaccacaaacaaaaatgagcccggcatagtgacatgcaccgtagtcccagcaactcaggaggctgaggtgggaggattaactgagcccaggaggttggggcttcagtgagctgatattgcaccactgcactccagcctgggtgacgtagtgaaactctgcctcaaaaaaaaaaaaaaaaagaaaaaagaaaaaaaaggccaggagcggtggctcacacctgtactcctagcactttgggaggccgaggcgggtggatcaattgaggtcaggagttcgagaccagcctggctaactggtgaaactccgtctctactaaaaatacaaaaattagccaggggtcatggtgcacgcctgtaatcccagctactcgggaggctgaggcaggagaattgcttgaacccaggaggcaaaggttgcagtgagccaagatttcgccactgcactacagcctgggtgacatagggagactctgtctcaaaaaaaaaagataaataaataaaataaattctacaggcggggtgcattggcttatgcctgtaatcccagcactttgggaggctgaggtgggtggattacaaggtcaggagatcgagaccatcctggctaacacggtgaaaccccgtctctactaaaaatacaaaaagttagctgggtgtggtggcgggtgcctatagtcccagctactcgggaggctgaggcaggagaatggcgtgaacccgggaggcagagcttgcagcgagctgagatcatgccactgcactccagcctgggcaacagagcaagactccgcctcaaaaaaaaaaaaaaaaaaaagaacttctacaaaatcagttttaaataatcaatttcatcctcttctcacaaggacagcagaacatgtctgtggtgggcatggcatgctgggaaattttaccctggggtagtgacctctattttgtgggtctggatcccattttcacgtcagatggagacagatggtgcaggtgaaacatctgcgtgtctgtgttctgaatgcaggataacatcacggtaatgagtatgtttaacggaaacatgttttgtgctgggaaaagtttgtttcctgaactctgttagatccgtggaattgccctgcaaaaggaactgagcaaccccacagctgttcacccctctgtaagatttgatgagaaaggttcatttccgtaagtgtggctgtgaatatttgtctctcttacttcaaactcccttaactcccacttatctttgcctttgaaaaccaagccacaggccaggcgcggtggctcacgcctgtaatcccagcactttgggaggccgaggcgggcggatcacgaggtcaggagatcgagaccatcctggcacccgagcgttggtggtatagtggtgagcatagctgccttccgagaccatcctggctaaaatggtgaaaccccgtctctactaaaaatacaaaaaattagccgggcatggtggcgggcgcctgtactcccagctactcgggaggctgaggcaggagaatggcgtgaatctgggaggcggagcttgcagtgagcagagatcgcgccactgcactccagcctgggctacagagtaagagtccgtcttaaaaaaaaaatgaaagaaagaaaggaaggaagaaagaaagaaaggaaagaaagaaagaaaagaaatgcaagccaccgctgagaaagaaagaaaagaaacgcaagctgccgctgccagcttggctttcctgcgaatagctcttacaggtcacactacctgagtggatgaacttttccagctcattttcgttctctggaagtaggtgcgtggactcaccctcgtcctctgagccctcttcttcatctcctaataacggtatcctgaggttcttataaagtgactcgagctgttgtctttcctcagcctgtgccagtcgactggagaatgatataaatgaatttagaagcacagttttcatgatgaataattcatttctcaaccatgccactttttgacaggaaaggagtcgcttgtggagtgggtgcagacataagactttgaaaccagactaatcatggtcagctctcaactgtctacatggtcaggccatttcctggagtaaggagtaactccgatcatcccaaagcatggatcaaagccaggactagacgtgaacaaggcactcacattgggttccaaacttaaggtgttgacaaaaaatccataatcaaacaaatcatctttctttccattcctttctcttctctttttctttctcttttttttcctttttctttcttctttcctctctttccttcctccctcccttcttttctttcctttttctttccctttctctctctctctccctttctctttccctttctctctctgtatctctccctttctctttctctctctctttctctctttggaacagggtctcattctgtcacccaggctagaagtgaactgatacaatcatggttcactgcagctgccaactcctgggttcaaacagtcttacctgctcagcctcctaagtagctgggaccacaggctcgtggcaccatgcccggctaattatttttgtatttttttttttagaaattgcgtcttgctatgttgcccaggatggtctcaaactcctaggctcaagctgtctttcctccttggcctcccaaaacactggaattacaggtgtgagccactgtgcccggccataatcatgtttcagtgtaatattttacaaaataaaaattaatgtcaagaaatccgtgatgaacaaaataggacagaatgggtgttactgatttttctacctcactgtaggtccaatcctggaagtggatcactgaacagctatttctgtttggtgtggaaatggatgacagtgttttcctaacatacttaccttcccagtactgtgtgaattatatattaaaaaaatacttttaggggccaggcgcggtggctcacgccagtaatcccagcactttggtaggccgaggcgggcagattacctgaggtcaggagttggaggccagcctgaccaacatggagaaaccccgtctgtactaaaaaaatacaaaattagcagggcgtggtggcacatgcttgtaatcccagctacttgggaggctgaggcaggagaatcacttgaacctgggaggcggaggttgcaatgagctgagatggtgccattgcactccagcctggccaacaagagtgaaactccatctcaaaaaaaaaaacaaaaaacttttagggttagtttattttttgtttttcttgctcaaaaggctgggacaggagcaagatttgagtgacaaaagggaggtgctcgcctcagtgcgaaatgtaaggaggtaccccaaacagtgaaaaatgaagatgagtattttaactcaatttttttttttttttttgcagatggagtttcactctttttgcccaggctggagtgcaatggcgcgatcttggctcaccacaacctccacctcccaggttcaagtgattctcctgtctcagcctcccgagtagctgggattacaggcatgtgccaccatgcctggctaatttttttgtatttttagtacagatggggtttctccatgttggtcaggctggtctcgaactcccaacctcaggtgacccgcccacctcggcctcccaaagtgctgggattacaggcgtgagccaccgcgcccggtccttaactcagtatttttaaaaattgaaatgaagcaaaaaaaacaaaatccaggatataccaaatatcaagattgtaaacagagataggatccaaacagtgctgtgctaaaccacaggggagcttgagtcaaaaggaaaggtgtgagtccctatacacgttttaatgtatttttaaatgcttattcttttccaaaacacttaagaagttcagaatatatttaataattgaaaactggtgtatgaaaagtcacaacattaagtttaaatattttatctaggccaagcacagtggctcacgcctgtaatcccagcactttgggagtccgaggcgggcggatcacgaggtcaggagattgagaccatcctgggtaacatggtgaaaccccgtctctaataaaaatacaaaaaaaaattagccgggcgtggtggcgggtgcctgtagtcccagctacttgggaggctgaggcaggagaatggcgtgaacctgggaggcggggcttgcagtgagctgagatgacgccactgcactccagcctgggcaacagagcaagactccgtctctaaaaaaataaaaataaaaataaatattttatctctaccctaaacaaaattaattgtaattttactttcctggtttaaataaaagcaaacttaccaatagtattttcaaaatctacttctggaaaaaatgaaccactaaaaattacataaaacttgtacttttgaacaggtggttttgttttttttgtttgttttcgttttggttttggttttggccccaggctccactatagcttagtgctaatacaaatgtgaaaacaataagaattgactagctcagcaactcaattcaacactgagtgtccaggagatatgttttactgagttgcattacaaaactttatatttattaatagttttgttataataatgaaatatacagaagctacagttacataatttttgtttttgagacatggtctcactctgtcgcccaggaggaagtgcagtggtgcaatctcagctcactacaacttccacctccagggctcaagccatcctcccacctcagcctcttgagtagctgggactacaggtgcgtgctaccacacctggctaatttttgtattttttgtatagacgcggtttcaccatgttgcccacgctggtctcaaacacctgagcttaagggatccacccgcctcggcctcccaaagtgttgggatcacaagtgtgagccaatgcccccggcctatacatttacataaattaagcggatgtagtggagataacccacaaccaagcacgcaggttacgctctcattagcaaaattccccttttacctttaatgtcactttgccttcatgtgacctactccaaggtggtcttaacatagctgcctcagaaaatatctcacacatggcaatatatcttgttttcacacttaattcaacgaagcaagcaattttgtacttctcaagctgtttctggtgggatacaatggaatcctagcacggaatcatacagtaggagtcagaatctgttggtttggtcagaaccgcatgagatcacagtgtgtctcacctttttctaccgtgaatttcaaaatgattacatcactcaaaacagcttgaccccaagctttatttgcgaagacggtgatgtaacttcccccaaagctgctatcaccccagactgcactgacacatttctagtgaaagggagagtggtcgctcttttctgctgtgcactattgagattccttccagagtagcaagttctttttattttatttatttatttatttatttatttattatttgcgacagagttttgctcttgtcgcccaggctgaattgcaatggcgtgatctctgcccactgcaacctctgcctcccaggttcaagcaattttcctgccccagcctcccaagtagctgggattacaggtgcccaccactacgcccagctaatttttgtatttttagcagagacggggtttcactatattggccaggctagtcttgaactcctgacctcaggtgatgtacccgcctcagcctcccagagtgctgggattacaggcatgagccaccacacccggcctcaagtttattttaaaataccaaattctggggtctgggaatggtggctcacacctttaatcccagcactgggaggccaaggtaggcggatcacctgaggtctggagttcgagaccagcctgaccaacatggagaaaccccatcactactaaaaatacaaaattagcctggcatggtggcgtatgcctgcagtaatcccagctacttgggaggctgaggcaggagaattgcttgaacccaggaggcagaggttgcagtgaaccaagatccataccattacactctagcctgggcaacaagagcgaaactccgtcccctcccctccaaaaaaagtagaaaaaataaaataaaataaaatactgaattttgggaggatgctagcatctcaaactgtgtctttcaagcatttttgatcatgactcccagtaagaaatatattttatttcacaaccgtgtgtctgtgtgtgtgtgcatgtctcacatgtatctgaaaagtttaaaaatcagccttttacattaatactttaagtaatattttcttttctttttctttttttttttttcagacgagtctcactctgtcactcaggctggagtgcagtggcacgatctcggctcactgcaagctccgcctcccgggttcacaccattctcctgcctcagcctcccgaggagccgggactacaggcacccgccaccacgcccggctaattttttgtatttttagtagatacggggtttcaccgtgttagccaggatggtctcgatctcctgacctcatgatccacccgcctcggccttccaaagtgctgggattacaagcgtgagccaccatgcccggcgtaatattttctaatattttctattctgctgaattgtattctgtcctgtgtctttctttctttttttttcatgtgtatcatgcctcaacatgagtacaatccacatgttgaaaaacactaatctggaaatttataatgaccaatactttagcaattataagatgtatcatcatcatcctttgacattaaataataatcagttgacttgttatgtctcatttaaggacagcagatattacttagcagatacttactatatcatataggagattgccatcccacatatcagggcaatgctgaaggctacgctcgaaattaaaattactttaacaagagcaggtctatgccgaattattgctaaaaagaaagaaaagaaaagaagtgctcaaaaatgttcattttagctatgtctttcagttaatatatttgtccttacagaggggaatggaagtcaaaaccagaaacactttcaaaaatagcttgttttgtttttttttgttttgttttcttttttgacactgagtctcgctctatcacccaggctggagtgcagtgcatgatcacagctcaccgcaactttcgcctcccgggtccgagcaattctcctgcctcagcctcccaagtagctggcactacaggcatgcgccaccacacctgcctaatttttttgtgtttttgtagagatgggattttgccacgttgctcaggctaggactcttaattttagaaaatactgaagttagattttcagtgagccgagatcatgccactgcactccagcctgggcaacagtgtgaaactccgtctcaaaaaaaaaaaaaagaaagaaaactgaaacagaccattggggattgggcatccaagaggtcactagagacctgggcagaggccatattagctgtgtggtggggacacaactgaagcagtttcaggagggagtgagaagaaagtaactgtagaccatgaattttgaaaattattttggggaactttgtataaaagaaagaagagaaatgggcacagctcctggaggagtctaagggatcgagagatggattttgttttttaacatgtgaacactggcagcatgttcgtgaatgggaatgaaagagtgaatcgtgatactacggtgccagttcattctggctgctgtaacaaaacaccacaggtttggtggcttagaaacaacagacacagccaggtgtggtggcccactcttgtaatcccagcactttgggaggccgaggtgggcagatcacgtgagctcaggagttcaagaccagcctgggcaacattgtgaaaccccaactctacaaaaatacaaaaattcatcgggtgcggtggcaggtgcctgtaatcccagctactcaggaggctgaggcaggagaattgcttgagccagggagtgggaggttgtagggaggtgagattgcgccattacactccagcctgggtgacgggaatgaaaccctgtcttaaaaaaaaaaaactttgggaggcaaggcaggtggatcaggatgtcaggagttcaagaccagcctgaccaacacggcgaaaccccatctctaataaaaatacaaaataaaattagctgggcatggtggcacacgcctgtaatcccagctactcaggaggctgaggcaggagaatcacttgaacccaggaggtggaggttgcagtgagccgagatcgtgccactgcactccagcctgggcaacagagcgagaccctgtctcaaaaaaagaaaaagaaaaagaaacaaagaaacaacagacattggtttctcacagttctggaggctgggaagtcccagatcaaggcatcagcagctttggtggctggcgagggttcactttctggttcaacagagggtgccttctttgttgtgtcctcacagggtggaaggagtgagacagctctctgtgacttctactgtaagggtgctattcccagtcatgggggttccaccctcaagaccgcatcacctcctaaaggccccaactcctaatatcctcacctttggggttaggatttcaatacttgaatatggggttgggggacaccagcattcagaccagagcatgcaggaaagggagagggaattgtcaggaaagtccttgagttggcctaagaggatggaagctgggacacaggccagccttggcatggacggttcaatttccagcaagagacagagaaaggaggtgtgattgctggtagacaggagggtgtggatactgtcttttaactgcttgtattttgtttgtgaaggaggcaaacaaggtcattctgggagagcaaggctggggtagaatacattgagatatttacagagctagagaaatatatgagaaagtcaccaagcaggatgggagaaatagactaggaaaatgaatagcatatttttaataaaatttactagaaatggaattgctgggtgtatttattatattttcttattttccgtattcctgatgctctggcatttggggccttaatcctggagacctcccttcccagggctagctatttcctagagacagcgaataactcccctacaagcacatctttgaaatacaaaccaaccaatccacagcccacaccccaaccatctccttttcaaactcacacaataagccaatctctccctgcctgccctaaatcaccccagggccaaatactggacaactagaaaccatccctatgatttaccaaaactattcaaatctatatttgctcagagtacctgccatgcctcacccattccttccctcagaaaccccagtagaggcggggaccttgctcaccctcactccctgtgcttcctgaggttactggtgtacccgtgtgtggtgggccatgtctcctgtttccaggaatctataagtataaactttttccttcatgaagatcatttgcatgtctgggagtcttgccataactgattaaaataaatcccccaggtatatttcaacactctaggttaaaaagtaattgccagccggttgcggtggctcatgcctgtagtcccagcactttgggaggccgaggtgtgcggatcacaaggtcaggagttcaagaccagcctggccaacatggtgaaaccccatctccactaaaaatgcaaaaattagccgggtgtggtggtgcacacctgcaatcccagctgcttgggaggctgaggcaggagaatcacttgagcccaggaggtggaggttgcagtgagccgcgatggcgccattgcactccagcctgggtgacagagtgagactctgtcttaaaaaaaaacagaaaaaaaaaaaaaaaaaaaaaaaaaaaaaaccaagaaaaaaaacaaagtaagcaccttggccaggcatggtggctcatgtctgtaatcccagcactttgggaggccgagccgggtggatcacctgaggtcaggagtttgagaccagcctgaccaacatggtgaaaccccatctctgctaaaaacacaaaattagcggggcatggtaatgggtgcctgtaatcccagctactcaggaggctgaggcaggagagctgagatcgcatcattacactccaggctgggcgacaagatacaagattgaaactccatctcaaaaaaaaaaaaaaaaagtaatagcattgtttttatgagaactgtcaattgccctctctagaagttgtgctcactgctagcctacaaacaagacatgagattatgtttcccagctcctttgccaatacagttatgagacattttgcccactttcaacaggatagctgaaaactggaattacagtgtagttttatgaaattaaattattcaaacttaaactaatttaaacttaaagctgttggaactttgaactactctgaacctgagagcaatgtggctatgcagcctgaatcacaaggatgcagtggcaacttctgccttttttcctgtaaataagaagatcaagaggtgccagctgtgagagccccctcagatggcttcccctcctcacagagcaataatcttccttggaacgttgccgtctataaccaatcaaatagctgtaacttatgcactcgtctcatatggaaaatgttacaatcctgctacaatgtcagtctctgcacatataagtgaaaccataacttctcctctttggaaatgctgtccccattagtttggagtcagtgtctcgtgggtggacatcctcaagctttgtgctcaaataaactctgtacttaatcatatttgtcgaacttcattatttaagcttggcagtttcaatgcacaattcttactatgagtaaggtagacatctttccatataatttttttttttttgttacagagtctcgctctgttgccaggctggagtgcagtggtgcgatctctgctcacttcaacctcagcctcccgggttctcctacctcagcctcccgagtagctggcctccaccatgcccagctaatttttgtatttttagtagagatggggtttcaccatgttgtccaggctggtctcaaactcctgacctcaggtgatctacccacctcagccccccaaagtgttgggattacaggcatgagcctgtactgcacccggaccatcaactttattagataaacaattttgtcccgtctctatcctacctacaactgggacctgaagctcaggggtggcagaggtctcagtgaccttctagcaccagcacacaaaacgagctagtgtcaaaagaaggaccagtgtgcaggcctttgataccccagccaggactcaagctctgtgctttggtgatggtggtgtcaatgggcaggtgaaacagtcatagctgagctttaggaagattgataatgtgtttggcgtggatggatgtattcatcacgttttttattttctgtatttcctgatactttgacatcttggggccttaactgacccttgaagagactgccctcccaggtccagccaattcctgaagatagtaaaccctggcctgcaagtgcacctttcatgtgcaagccgacacacccaaagcctacaccccaacaatctctatggagccctcatgctccaggccaccatcccctgcccccaaccaccccagggccaggtcccagacaaccagggacataccccatgccccacagccaccaaatcactcaagctgatcccaagcccgccttccctacctgccttcctgtaaaaaccagaataaagttgttttttttaaaaaagacagcctcgctctgttgcccaggctagagtgcagcgacccaatctcagctcactgcaacctccacctcccaggttcatgcgattctcccgcctcagcctcccaaatagctgggattacaggtgcccaccaccactcctggctaatttttgtatttttagtagagatggggtttcaccatgttagccaagctggtctcgaactcgtgacctcaagtgattcatccacctcggccttcctaagtgctgggattacagggatgagccaccgcacccggcccagaataaaggcttttgctcacactttcctggctccctttgccttctgatagaccctggtgcttccttgtgtggactcctgcttctagggacccgtgagtatcaggcttcttccttcatgacagtcatttctgtgtctgcatgtctcactcagcatatgtgattaaataaaatgctggctacatgtgaaagcagtggagatgggtaggtggtgggggagctgactcagaagccgccctgttgcaggcacttagcaaatgtgcagaggagaaggaaggatgctctggggcgggagcagcagcaggacacaaggtgccttctgctttggaggactctgaagcgagaggtgttgaggaggttccaggacaagccacagtggggagagttgctagaaaggctgctgacagggccgctgtgtgtgcccatgcattttgtgtgttccacaaagagatctcagacacagcctgtgctctactcactacaacatcagcccgtggagttgagccaccttctcacctgccccaagcggtgtcactgcgcatccccctccagagggggcaccttgtctaacacacatgaaggcaccacgtgtgcaggctccttggtgaccagccagcaccctctggagccacacatcacgacagcttcaggaatgttgcgggtccacccgccctcccagatcccttggcttacctttattcctcaggaatttcatggggttcgtaggggatgcagctaaaaggccatcaaaggggatcaaaaagaagagactttaagatggtttaagatgaacttgggaaaacaaggaaataacttagcattagagaaggacgccgaacacacagcttccaaatatctaagatgggatgtgttaatacattcctcccaatgcctggcagcaatgtgtgggttaatttgcagaagcctggtgagcctgctgttctttttgcacctggtgcttcctgtcatgaagaatgacctttaggaacaggatacttttggtttctggtctccttttgcagtcatacaagttgggaaatctctgcccaaattaaggacctggagagacttagagttgaaggggctacgacctcattagaaggtcagcaagggttgggcacagtggctcatgcctgtaatcccagcgaggaaggcagatcacgaggtcaggagttcgagaccagcctgaccaacatggtgaaaccccgtctctactgaaaatacaaaaattagctgggcatggtggcacgcgcctgtagtcccagctactcaggaggctgaggcaggagaattgcttgaacccggcggtggaggttgtggtgagccgagattgcgccactgcactccagctgggtgacagagtgagactccgtctcaaaaaaaaaaaaaaaaaaaaaaaaaaaaaaaaaaaaaaaaggatcagagagccaggcagagaggccagggaaccaacaatagtgtcctttcctcggacacaaattacatgcaaatgtatcacacagacagcatttcccttgcatggaatggagattatttacaagcatcatatatctccacaaagggttgctgagcttcaaagattgtcggggttggttttgctgttataagataaacaaacatcctctagtactcaaattagaagggaaccatagaaaatgcttataaagaattctcggctgggcatggtggctcatgcctgtaatcccagcactttgagaggccgaggcgggcggatcatgaggtcaggagatcaagaccatcctggctaacacagtgaaaccctgtctctactaaaaatacaaaaaattagcttggcgtggtggcgggtgcctgtagtcccagctacttgggaggctgaggcaggagaatggtgtgaacccaggaggtggagcttgcagtgagccgagatcgcgccactgcactccagcctgggcgacagagcaagactctgtctcaaaaaaaaaaaaaagaaaaaaaagaattctgtacactcacaaaccttctgtgtctagacttgcatgctctactgccaaatgtgcaccaaattcaagtcagacaggcatacctgtgtaatctggatgggatcaaggtttttgtgtgcgcttattaaagtgaaatgaaaaagagaagaaagtggcaatccctaaagagaaagcagttaacagagagtgaagagcataagatctaatttccaagcaaatgtttatctaattatactctattttatggacctttctaccagcaagcacacagtacacattcacatggcagataagaggactccaggctacgattctcactccactgaatgaggaattcaatgactcacccgtggatctcgaggcagccccttgaatcccaggcaactgggttttatgaaagaacactttgggctctttggtgatgtttctgggtggttgtgaccgtttactgccttgaaaagaaaactttttgcggtgaaatgtaattaccttctttttatctcccctgaaacagcttttcaattctccctgagtcacataaaaccagtggttgaagctacctggtaagcctgttatgtttccagtgggatggagtccatctgcatacggcaagcataaatgaagttggcattccattaaaaacaaaaacaaaatgaggaaaccactctgaaccttgtccatcactctcaaattatcagtattttatcccgtagatgaaaggaaatacttagctacagtccagcatctgtcctctatttatctgaggaatcaagaagttctactcccttcagaatgtttgggcagtgacttggagccaccagtgtgaggtcagtccttgctgtgataatggagttccttcatggaaccatgctgaccaatggggagactacagtgtaagagggcagtgcttggaggtgcaggcatgatgagaccaggtccctgcctgcagtgtgcagattagtgaggaggcagaaagaaatcaattacagtcagccctccgcatgcatagttccccatccgtgatttccaacaacctcacttggaaaatgttcaggaaaaaaggaatgggcacggtggctcacgcctatgatcccaacactttaggaggtcaaggtgggcagatcgcttgaggccaggagttcaagaccagcctggccaacacagtgaaagcccatctctactaaaaatacaaaaatttgctgggcgtggtggtgcacacctgtagttcaagctacttgggaggctgaggcatgagaatcacttgaacccaggaggtggaggttgcagtgagctgagatcatgccactgcactccagcctgggcgacagagcaagactctgtctcaaaaaaataaaacaacaaacacaaaaacaaaaactagccaggcatggtggcgtgtacctgtagtcccagatactcgggaggctgaggcaggaagatcacttgagcccagaaggcagaggtagcagtgagccaaaatcgtaccactgcacaaagaaagaaagaaaagaaagtggaaggaaagcagtcacccttagaagggaggcaatgtgcacaggggagacccacagcaggaaggtaaagggggactcctgatgactgaaagtgggccctaggcttcagagatgggaggaatagaagacgggctcaaaaaaggcaatgaactatgtcatgtatgagggagacagaggggacctgggagtgctggatgttagggaccactgaaatcaatactgtccaggctgtgcatgataggtgagaggaagggaatacttccaggaagaagcagaagtctgggactttcttttgactcgtgatgtgacctgaccaacaggaggcccttttttttttttttttttttttttgagatggagtcttgccctgtcacccacactggagtgcagtggcacaatcttggctcactgcaacctccacctcctgggttcaaacgattctcctgcctcagcctctggaaccgctgggattacaggcatctgccaccacacccagctaatttttgtatttttagtagagatgggctttcaccatgttggcggccaggccagtctcgaactcctgatctcatgattcacccaccttggcctcccaaagtgctggggtgacaggagtgagccactgtgccctgccaggaggccctttaagacattaaaaaaactcttatctgtttaaacagagatgggatcttgctacgttgcaaggctggccttgaactcctcagctcaagcaatcctcctgtccctcccaaaatgctggcatgagcctcggtgcccggcctagaaattttttcaagataataatcttagtaataaggttataagttaccaggatgcttgtggtatattgcatatgacttatgaaatcctttggaatctctaaatcagataatttggattcactctggctattagaatacaatatccacatcctactggtagtatgattctggatatattatgctgctttctccaagatgagataatactgctaacttcattctctccaagggcctttgcacaaatcatgtaaaaaaaaaatccatcaataactaacttgcccctgccacatttatcaggtgaccactaatgtgtcaggccttgaaaggactacaatcaaatgttacacacctaagtgagcccaagctagaagagtcagaaggtgaaaataacagcctcccaatgacatcactaggccatcatttctcaaccactgggaagccatgggccctttaaaaattagatgagctttatgagcccaagttccactcaatacccttgaagcctatccaggaaggatccttggcccccagttttagaaatacttatgaactggagagaagccacccaagtcttctgatccatctttccccttttcccctgtgaacactgagacttcattactctaggtggactggctagctctcttcccttctgaatcctgctccttcaagtaagcctttcatctgcagaagatttcaaaaaaataaaagaccgaattcaaggtaaaccttgggtaatggtgctctgaagtgcagtggtgtctagttatggaaaggaacaaacacccctgccctctgctctgtaagtggcattctaaacccaccaagggacttgcccagtcctccagcaagtcctccaggccctgctgccctgttatccttggggttgcaggcagcaaagttctagggaactcaggtcccagaaaatgcagtgattctgaatgtccaacacagacttcatattccaaagggatactagttctcatgttactataaatccttcgagacagagaaaccaggtaactttatttctcattgtttaggattttctttttattatcaaatctctgctatagaaacactgaagaaaatgggaaaaaaaatcactggagaggcagcataaaatggtggctgaaaacaagaactctggagccaatctcagctctactcccttactagttgtgccccttaggtaggatccttcaacatctctgcttcagcttagccatttgtaaaactggggtaacagtacctatctcagagtaaaggggactaaacaagttaacacttggaaagcatttaaaagaaagcccagcacataagtgttatatgtatttgtaaaactttttaaaaatctcaactgggttaacttttccatggatctttcaggtccttacccatatacatttttttagatgtgttacagtaagtatgtatatacaattctgtatcctttttattccttcatgttatgtatactgatgcagtgtccataattataatttatagtgattgcctaaaacaaattacaaactaattgcccaacaatgcagtgatgagtaacaatggacgctgacacactgggctaaggatcactttctgtccagcaacatcagtctcacactcctaggcaataacttttctaccgttagtcatctcattcattaattttctctaaggaggttaatcaacagtaaataccccattcaatactattatttttcttacattcagatttagcacttcatattctactcctgggcacccagaccctccccttataacaacaaaatctgtatttctacaattatgcacaaaatgttattgtagagttttccatccagtactccagcttgatgcaaaacagtgtatttccagtcaaaaacttttctctgcataaggtttttcccttagcaattcacaccaatctacaattggtgagagctcttgctaaaagatgcctcattccccacagtcatggtcctcaagtatgaattactggtagaccataaggggagtttagagtttccttcattgttaattatctgattttgagtaagggctaaataactgctgaaagcttttccctattcttttccttcatggggtttcttctaagatgatattttctagtaaataatgtgggagaagtcttactgaactcttaatgaaaaatgtcccctcttgattatgtttatagggttttcctcaatgtgttgtcaaatgtacaagaaacgaaaaactcgcataaattcaattcagtttctcttcactgtgatttctctggtgttgaagtagggctgagtgaccactaaaggcttttccacattcactgcatataaagcgtttctctccactatgcattctctgatgaataataagggaagaattcttacaaaatgctttttcacaatgattacatttgtagggcttttctccagtatggtttcttaggtgtacaataagggatgaactctcattaaatgctttcccacattcattacacctgtatggtttctctccagtatgagttctccggtgtgcaatgaggtgagaactacagttaaaggatctttcacactgattacatttatagggtttctcaccagtgtgaattctccgatgagcaacaaggtgacagctctgactgaaggattttccacatttattgcattcatagggtttttctccagtatgagtcctttgatgtctaacaaggtgagccatctggctacaggattttccacatttattacattcatagggcttaattccagaatgaattatctcatgtttagtgagggctgagcgttctctgaatgctttgccacattcctgacagttatatggtttctctcccgtgtgagttctctgatgggcaataagatgggagctccagctgaaggattttccacattcagtacatttatatggttttgctccagaatgagttctttcatgtttactaagggctgagtagtccctaaaagctttttcacattcatcacatttaaagggtttctctccagtatgcattctcatatgggcaataagatgggagctccagctgaatgatttcccacattcagtacattcaaaaggtttctctcctgtatgagtcctctgatgtccaataagatgagagttccagttgaaagatttcccacactcattacaaacataaggtttttctcctgtatgaattctcttatgtacaataagatgagaattccagctgaaggcttttccacatttattacattcatagggttttattccagtgtgagtccgttcatgtttcgtaagggctgagcgattcctaaaaacttttccacatttatcacattcatagggtttttctccagtatgagttttcttatgttgaataaggtaagagctccagatgaaagacgtcccacattcattgtagtcatagggtttctctgcagtgtaagtgcttgtatgttgagtaaggaaagagtcatacccaaagactttctcccattcattgtatttatacgctttctctacagtaccaattttttgatgttccataaaggatgagaaataaaagatattctcatattctttgtaattatactggttttctccaacatgaagccttgggtgttcattaaatgatgggctctggttaaagatttgatggcattccttatattcatagagtttttctcctgtgtgaattcctttatgatcaccaaaatgtattatatgattgaaagatttaacagcatcagtacatttgaaaagattatctccagtttgtattcttgcagggtaaataggttgaatggactgataaacagttttgtcataatcattattttcacaggtaaccttatctgcatacattatggctgagtcacatctccaactttgagcatgtgtatcaggcttatagaaatgttctatctgagaaactctctgagatggaacaaagtttaagttctggctaaactctgccccaagtccacagaattcagagcttctctgggatagtacttgcttttgcatgaagaccatctgcctcatagctgtactctggttcatgtggtacatttctaattggtctttacatcccaaaacttctaacctggagaaccaaggatcatcccatatatatctttccaacttcatgccatgggattgttcttcctcaaaaatgctctgtgctgggatcaatgctttgctttcaagatttctcacccattctgaaacagacagaaaaaaagctatgagagcatagagaaagacattagaataaagtgggaatggtgagatttactgtccatattatcaaaaacactagtataaatttgttttcaagtccaggcttagaactcagagaaagatcataatagggaaaagaatagtgaaaagtaaacaacagttaaccagaatacaaagtgtgtactgaaaactaatgaaaccatttaaaagtactttccatgaaaaggaagaccagtataagaatgtgcaagaaagaggccggacgaggtggctacgcctgtaatcccagcactttgggaggccgaggcgggcggatcatgaggtcaggagatcaagaccatcctggctaacacagtgaaaccctgtctctactaaaaatacaaaaaattagccaggtgtggtggcgggtgcctgtagtcccagctgctcaggaggctgaggcaggagaatggcatgaacccgggaggcagagcttgcagtgagccaagatcgcgccactgcacttcagcctgagcgacagagcgatacaccgtctcaaaaaaaaaaaaaaaaaaaatgtgcaagaaagagttaactctgcaggcctgacgtgctcaaaccttgcaaaggtagcctgtttcctaactggcccttagccaactcctaggaattaagatcttggaatgttctaactagtaagagtgttttgcatgctcaaggtattgaagcacatttacttttaacttatttagatatgtgtgcaaacaatgtcattcatagtgatcacctgctttccctcagggtggtctggagtttcagcgatggcagtgagtcacgcaggcactgtgtgcctggatgagcaacctctcaataaacacactggactcctagactcaggcaagtttcctagtagaaatttcgcacgtgttgtcacaactccttgcttgaggaattaagtgtgccccatgtacgctactggaagcttgcacctggtctaacctcatgcacctttttcctttgctgatgttgctttgtatcctttcactgtaatacaccataatcctgagtataatgacttttgagtcctataagtactcatagtgaatcagtgaacctggaggtggtcttgaagacccctgacaaaaggacccagtgaatgttattaaggttaaaaaagaaaaaaaaagaataaagcctttcatcttaacaaaagttaggtagatgagcacacaaggcctttagcaagtaatatttacatcatgagtgctctcacttctgtgttataatgtccttctactcccatatcttgacaagtgcagaaaaaaggaggagaggggtgtttagagagtatcaccaagcgaggcttcaagccaggatgttatctatgacaaaatgctttgtttcctatgtcacagaatccagtcaatcacacaagatccaccaacccaaagggcaaacatcaccagagtttatggatacccctaaagttacacttctatccaccacagaatatttttagagcaatgatagatggactaggaagacagcatagtgtgaaaaaacagacacaggagttacagtctgctaatctgtatgtgaacaatggccctgctgctatccttagagagcttttctgatgactaaagtcgagactcagaatccagccaaactcctggcaagtttaatacacaggaactgcctattatcactgcttaagtatcaatcctctaacaaccaaaggaggctatattagtttctttctgctattgtaacaaattaccacacatttagtaacttaaggtaacacaaatttatgatctttccgttctggaagtcagaagtccaaaacggctttcactgggctaaaatggagttattggccgggttgtgctccctccagaagctctaaggaatccaccatatccttgccctttccatcttctagaagctgccccaattccttggctcgcagctccttcctccatctgcaaagctcatcactccaacctctgcttctgtcatcacatcctctcccatgtctctgaccctcccaccacaatcttataaaaggacccttgtgagtacatttagaatccactcagacaatccaggataatctccccacagcaagatccttaatttactctcatctgaaggtcccttttgccatacaaggtgccccattcacaaattctggagattaggatgcagatatctttgtgggggaagtcattatccagattgctacagggtctaaagccccaggcaggtcccaacaagaactagaccttgccctctctctctgcttctttttttctctttactatatgtaatttccccccttttaccacccaagtccattattttttgtttaatttttttgagacagggtctcactcaggcaggagtgcagtggtaccgtcatagctcactgtaatctcaaattactgggctcaggcaatcctcccacctcagccttccgagtaacaggactacaggcatgaatcctgtatatacaaccatgcctggctaaatgtttttaaattttttatagtgacagggtcccgccatgttgcccaggatggtctcaaattcctgggctcaaataatcctcccaccttggcctcccaaagcactgggattacaaatgtgaacccccatccctggcccccacgaccattataacagaggttctactctgcacaactggcatttattatcaatttcaagctcagctcttaaaagttactgaattatcttcatatagatttttaaatccttccagtaaaagctttttacaaatggaagctgaccaattccctgaccaaatgaaagaccaactgaaagaccaaatgaacagttcttgtccaactttatactcactcagtacttgtagtctactgagtttccagcaccagagacaaggcaagaaagtacggtctccctggaagtcagaatctatgtgaagagagatcctaccaaacagtgatgaatatacatgaaatatcactctgaggtcgggcatggtagctcacgcctgtaatcccagcactttgggaagctgaggcgggtggattacctgaggtcaggagttcaggaccagcctggccagcatggtgaaaccccgtctctactaaaaaaatacaaaaaattagccgggcatagtggcaggcgcttgtaatgccagctactcgggaggctgagacaggagaattgcttgaacccgggaggtggaggttgcagtgagccaagaccacaccattgcactccagcctgggcaacaagggcaaaactccgtctcaaaaaaaaaaaaagaaaagaaaaagaaatatcactctgagatggtggggttatagaacagatgctaagtgggtgggagatcaaaaaaggacatcagcactaactgaagtgatcgaggatggttcacacaagagaaacaacatgagctcagccttgaagcacgacctgggtacagactgactagtcactcagcatgagcagaggcatgcatggcgtgaccagtgtgtgaggaggaagataaggatacctgctgaataaaactccaggagctattcaggaaatgagagaaacaatagaaaaaatagaaggttttgaaatccagttgttttgttacaaggcaattagaatcactgtaggtttactgacagggatctcataatcaaagatttcagggatataaatctagaaatagtacctgaggtggctaataacaagtgagaatttcctcatcaacttgggctggaattttacgagaaaggggccggactgtgagagtgatgatggaagctgaatgacgtaactaacatttcagaggaagaaaatcttgggagttagaagagagattacttcttggagaggaaagagctcgaagtcaagatgacttctcaatctccagcttaggggacatgcagaaatgcacctcaggaagatgggagaacatctagaaagtagagacaagattactggttctatcggctgtgatcaaggagacaggtgagatgctttgtaaaatgggagaagtgtaaggacagaggtgctggaattgcagggctctggatggtaactaagaatgggcagcactgaaggtagaagaattaaagctcctggaattcatgagctcttaggggaaagtttccaatctgaatggaaaacaactggagagattctccacaaaagtcccctccattagagtgggtggaagataatccaacttcaggactcaagaagaggctgtggcacattgccaaaaataataagataaagacaatgtgtataatctcctattgttgaaaacatgaaaaataactacaaattcctacatgcttgtagctgcataaagaaactctgttatgcatgtaacagaaattactaaaagtgattacctgaggcagaatgtcagtgaaaatggccaagtaaagacatgtaaaatttcaccactctgtaaaaccaactaaaaaactggcaaaactgtcagaaggcaatttttcaaaattctgtaaattaaccaaagcctaggccaggcgcagtggctcatgcctgtaatcccagcactttgggaggctgaggcggacggatcacgaggtcaggagatcaagaccatcctggctaacatggtgaaaccccaactctactaaaaatacataaaaattagccaggcgtggtgtcgggcgcctgtagtcccacctactaggggggctgaggcagcagaatggcgtgaccctgggaggcggagcttgcagtgagctgagatcatgccactgcacttgagcctgggcgacagagcgagactccatctcagaacaaaaacaaaaacaacaacaacaacaaaaacacaaaaaaacaaaattaaccaaagccttgcagcaaccaggaaaacatgtattctagaaaagtaaattttaataagaacagtaagctatatggtgttctaacttaccccggtcccatctctggctcagtaacagccttggaaaaatgacagcccccacttctggtacttcagtgagcagaacaaagctggagctttttcaaagcctcattctcaaagaacactcattactagacctgcctagtggctccctggaagactccactggaaaagctggtctttattttgcctgacagagaactctcatagtgttacaaaacctctagggaggaggtacttttctaacatttacaggcaatgttttaaagtcaccactgcctgaggtgatggcaaacaggtggggcccaaaacacacgagtcaaaaagatagaatgaaagagctgaggaatgagatgtctatagggactctgagaagctccaacctagaaggctacatgcatacccataataattaaactagggccaggggtggtggctcacgcctgtaatcccagcactttgggagggcgaggtgggtggatcatgaggtcaagagattgagaccaccctggctaacacggtgaaacctgcctctactaaaaatacaaaaaaaaaaaaattagctgggcgtggtggcgggcccctgtaatcctagctacacaggaggctgaggcaggacaatcgcttgaacccaggaggcagaggctgcagtgagccaagatcgcgccactgcactccagcctgggcgacagagcaagagtctgtctcaataaataaataaataaaataaaataaaagccgaagagagaatcctgaaagcagagagaagaaattcatcacgtacaagggatcttcaataagattaacagcttgtttctcagaaacgactcaggccagaaagaaagacaaaaaaacatgacaatcaagaattctatacccagtaaaattatccttcaaaaatgaaggagaaatcaagagatttccagataaacaaaacgccacagttcactgttagcaaacctgtccgacaggaaatgctggctggggatagtgactcacgcctgtaatcccagcactttgagaggctgaggcaggggcatcacttgagctcaggagtttaagaccagcctaggcaacacagtgaggcgtggttgtgtgcacctatagtcccagctactcaggaggctgagatgggaggatcacttgagcctagaaggttgagactccagtaagccaagatcatgccactgcactccagcctgggcaacagagtgtcttttctatctcaaaaaacaaaatggaaatgctaaaatgagttcctcaggctgaaatgaaagaacattcaacagtaactcaaaataaaaaacagcaataaagatagctacataagtataaaaagacaatataagtaaaattcttgtttctagctcctttttttcagtctgttaaaagacaactgcataaagcaataattataaatccatattcatgaacacacaatgtataaagatgtaatttgtgacaaaacagcataaaaggaggagggcagagctatacacaaagttttggtatactattaatattacactagtattaatccaaactacattgtcataaattaagatgttaattgtagggccaggcgtggtggctcacacctataatctcagcactttgggaggccaaggcaggaggattgcttgtgcacaggagttcaagactagcctgggcaatatagtgagaccttgtctctacaaaaaaaaatttttttttaattaactgagcatgacggtgcatggctgtagtcccagctacctaggaggctgaggtgggaggactgcctaagcttgcaatgcagaggctgcagtaagtcaagattgtactactgcactccagcctgggcagaagagcaagaccttgtctcaaaagatgttaattgtaatccccagggcaactaccaagaaaataactcaagattttatagtaaaagaaaagtagttacctgtgtgtatgcctctgtgtatctgtgttttgggggaataacagtaatgtgagtaacagcagggagtaaaaatgagttatttttggtggtgtttttcagacagggtcttgctctgtcactcgggctggagtgcagtggtgaaatcacagctcactacagcctcaacatcccaggctcaagcaatcctcacctcagccccctgagtagctaggaccacagacatgcaccataaagcccagctaagttttttaataaaggagattttttttttagcttatacattttaagtagctttcagatatttgaacattacctatattttaaaaatctattttgtttggtacccacaagatctaagtaagaaagaacaaaagcccaagccgggaacggtggctcatgcctgtaatcccagcactttgggagcccgaggtgggcggatcacttgaggtcaggagttcgagaccagcccagccaacatggtgaaaccccgtctctactaaaaatacaaaaactagccaggcatggtggcgggtgcctgtaatcccagctactcaggaggctgaggtgggagaatcgcttgaacccgggaggcagaggttgcagtgagccgagatcgcaccactgcactccagcctgggcgacagagcgagactttatttcaaaacaaacaaactaaaaagcccaaaaagactatttttttgaaataagcatctatagctataggttacaagtttggcaatacaggaaataaggaaaatatttgaagtagctacatggataagaggtaaccttagaggcaaccttagaggaagggaccgcagaaaacaggagccatcaagagccgacagcgagggaaaatggctaccttattaggatggtgatgcttctttgctctaaatcaaaagcagcaagagaagaaagctccttagagggaattctaaatgcatctgaggaaggtaactcttcatggccttatcccatttctcaacaaagagggcttggggggaagttccttgttcagcctggggtctgccctcacctggacaagtgcgttgaggacatgcctgctccactgaccacggctcttctccttgctccaacagggagatgacctcaggcttggcaatctgatttcctatgcatggaggaaaagcatggaaatcatgtcatgaggcttcaggacagccaaagaaagcttctcttgcctattcctccctgtgacttctcaacctgggcagaatatgcaaggtccttcccactccatgctctttaagcattaggagtttcatccctgaacctcagggcccaagatcatctcagctcttctgagacaccaccctcgcccctgcaatgagcttctaaacatggagcagctgaaggcattaccatgggaacagcttcgtttacttgggcagcacctgccttacccacagagagcaggtgaccataggtctccagcatcacatcacggtacagggtcctctgaacaaggtccagctgcccccactcttcttgggtgaagtccacggccacgtccttgaaggtcactggttcctaaaagaacacaaacgttccttctcagcctgtgaccaccccctccaatatttccagggatggagtgaggctgacagccctggggagagaagacaggatgtagagaaactctcctggttattcaagagtctgactaatgtgagtcaggtctcattgagaaccacccaagacctcatatttgttatatactcttagggaattagatacctgggtccacaataaccacagcaaagctgagcaggtctcttcgaagactcttgccaaattccagcacactggctatgtcccccaccttggcaacacccctcttctggaaaggcagtcatataaaaaggcctggaccagtgcagcaacaggctatgagcactggctacaagcgagaccttgaggatggagtctttgctccgacacccagataaaggacctgaaagggtgatctgtacattcacaagttgtctttccagccatggtggggaggtttccattctcagttcatctctgtcccaaggactgaagctaagggtgagcaggatgccccagagcagcccaggccaaggagaatcggttacagctgccattaaaagcacattagttacaagcaatctaaactgatttttttttttaatgaaagcaagaaaactaactggaaaacgagaaggaaaaaggaaaggtaatctaagtctgatttttccaatgaatacatccctcaagtccttttattattattttttaattattttatcgagacagagtctcgctctgtcgcccaggctggaatgtcatggtgtgatctcagctcactacaacctctgcctcccaggttcaagtgatcctcctgcctcagcctcccgagtagctgggacaataggcgtgcaccaccccgcctggctaatttttgtatttttagtagagacagggttttgccatgttggccaggctggtctcgaactcctgatctcaagtgatccgcccaccttggcctcccaaaatgctgggattacaggcatgagccactgcacccagcttcgagtccttttaagaaatcaactcgccaggcacagtgactcacacctgtaatcccagcactttgagagtcctaggtgggcggatcacgagctcaggagatgagaccatcctggccaacatggtgaaaccccgtctctactaaaaatacaaaaaaattagctcagcgcagtggcacacgcctataatcccagctacttgggaggctgaggcaggagaatcgcttgaaccagggaggcggagcttgcagtgagccgagatcgtgccactgcactccagcctggatgacagagcgagactccatctcaaaaaaaaaaaaaaaaaaaaaaaaaaaagagccgggcgcagtggctcacgccggtaatcccagcactttgggaggccaaggcaggtggatcacaaggtcaggagattgagaccatcctggctaacacgcggtaaaacatcatctctactaaaaatacaaaaaaattagccaggcgtggtagcaggcacctgttgtcccagctactcgggaggctgaggcaggagaatggcgtgaacccaggaggcggagctggcagtgagctgagatcacaccactgcaatccagcctgggcgacaaagcaagactctgtctcaaaaaaaaaaaaagaaatcaactcaggccaagtgtggtggtgcacacctgtagtcccagctactgggaaagctgaagaagtgggaggatagcttgggcccaggaggtggaggctgcagggagctgagatcgtagtactgcactccaaactgggcagtagagcaaaacccagtctcaaaaaaaaaaaaaaaaaaaaaaatcaaccgcaagacacccgctcaacagacacgtgtgcagtataccgctcccactccaagggtcctctggacctgtgcccctcctcttcacagctacatcatatcacttctacccaaatacagcgtttcctgtggccctcttagtcacagcttatgaactgagtttgctgtctctgatctgggccagacctccctgctgaattttcagtgtatccatttttactctgtctcaattgcttcccctctaccttcacatgatgggcttaaaacaaagaactgcttctgctccaataaataccataccctgaaaagtcaactcctgctcaagaccccccaggctcagccttactgtgccccatgacaaggactgtccatcctcttttccacggctgaacctcatctctgtgtctcacaacctcgaagacacagaatcatccctcctgcagcctcacaccccatgtagagacgcctcctgcaccctcgtcccactgcttctgacagtccatctcctcctgcaaggtacagtgcaccctcgccttctctccttccttgtcttccagccttaccccagtgcagttcctcctctgcctttattatccgttttcctgttccttggtattggaaattttttctttatatttatcatttttgctgatctatattgaaggatcttggagcaacaattatatgattcttatttttaccaagctctcaccaagatctccccaatgtcttgtgattgtcaagtccaaagtttgatttctgcctttaccttcttggcctatgcagcatttggaagtgctggccacaacctccctctatgaaacactccccaacccccatggtcaatgacaacttcttggttttcctcttacagactgcccagacctcagtatgcttgatgactactgtttctacattttatggtaatgtaaggtttttttatttaaatgtaacatggagttgggagtggtggctcatgcctgtaatcccaacactttgggaggtcaggagttcgataccagcctggccaagatgatgaaaacccgtctctactaaaagtacaaaaattagctgggcatggtggtgcacgcctataatcccagctactcgtgaggctgaggaatgagaatctcttgaacctgggaggcaaacgttgcagtgagccaagatcgcactactgcactccagcctgggcgacagagtgaaactctgtctcaaaataaataaataaataaataaataaataaatgtaatatggccacagaagtgcacaaaacctatgcttgatgcactttcacagagcaatggcacctggggaaccagctaggcagctgtgctgatggcccagggtgcctctgaccctgtgcttgtcttacacatcctaacctccctggggtggcaccttcttagatggcttcaatgttcacctacacttaacaaggtgcaaacccacaccctaatggctgaccagctggtagactaagccacaaattcacttcccacccctcccaagaccccaatggaatcattatatgttcaaaaatagaggaattacatctaataaacacaagaggaatgaaatcattggagcagttctgcagtccctaataaaacagtggacagtggcaatgaccatcaatgactgctcagctgcaggtgaaaggcagacagggagctttataatggaggggtcagtctgacaatacctgcacccactaacccatcatacctgaagatgggacaaccagacaccatgtgcccactgatgcaatgcagtatgaagaacccagcaccacctatgaagtattcttatcaaaaataccaaatgaatctactcaggcctctagtccaaatactagctaacaggagacgaggggatggaggaacttattcaatgacatcatgaaggcaaaaatcaggcaaaccaacaagaccagtgacctagtttcttcagcatatgaagcatgtgcagtgtgtgggccttgtttggatcctgatttgaacaaaccaacaactgtaaaaacatattttagagacacatagagaaaacaatatgaactggatatcaggtgacattgaggaattattggtaatttgctgagtatgataaaggtattgtggtttcttccttaagggtacatatctcttagatacacagaaacactcacaggtgaaatgatacaattctgagatttgctttcaaatcctccagtttaaaaaaggttgtgttggaatagatgaaaagaaatgcagaaagtggaaagctgacagctgctgaagctggtcaacatgggtgcttgcagcaggctgaataacaccccccaaaggatgcccatgtcctaatcctagaacctgtgactgttatcttaatgataaaaggaactttacagatataattaagaatctttagagggattaccctggattatccaggtggcccagtgtaatcaccaaagtccttatcagtgagagagggaggcaggagtcagagtcacaggagatatgacgcaagcaggggtcagagtgatgtactttgcagatggaggacagggcatgagtcaggaagcagtctccccttgagcctccagaagaaacacagccctgcagacccattttagacttctgagctgcagaacagtagaataaattcatgttgttctaagctataaagtctgtggtagtctattacaatagcaacattaaactaagacataaaactaaactaatacagggttcatcttctactttggggttcaaaaatctcctaaataaacagttggctttttttttaaagaacgttaaagaaataacccagccagtgaaaaaaaatgggggcgtcagcaccttgaattccacttattcctccaagaggcagaacagatagatgaaggtaaggctgaccaactagactagaagcgattccagccccacactaggaggcaccacggtgaagcaggtgcttcctgcaagaggactctgggagaggcaggagtgagtcaggctgaaaacagggcaggtgaaagtctgcactcgcacagctttgcaagtgcctgtgggtagtactgccagcagccatgtacttatacacgggcaaaagtcccaggagcctcctcagacttgagaccgcggctaggttctcaggctgcccaggtgagtggagacctcttcagtcccaccaggtggggaagagaagggagtctgtggcctcacagctctatatctatgaaactggaagcagaactgaccagctgaccctggcccatgcaggcccacgaaacccagggcatgcctcaccaggagcacagagcggagtggaaggcaccaatcatgaatcagatctatgcagctgaagtagaacaggacttccagcctcacagccctgccctgagaaacacacacagaccagacgtctcctggacatgagaaacacctgatgcacagataaagcgactgaactaagtagccacaaggccagagaatccagacaacagccacattcaactttcaaagacctgttaattcctattctcagattctcagaccagagtgatttcagtataaagtgggacaggatgctacaagagaggctgagagaataggaaagccttcacagactaagaaaagaacagaagacacagcaactagttcaggaggccctagagagttctgctgtggtgagaacatgatcatcaggcccccaacccccaccaagaaaaggacatggaatatagagagatcagagacacggcaatttgttcaggaggtccagcagctaacagaagagcccagaaagagaacctaaaggaaaaggacaagagggaattattactttttaaataacacaagacttcttaaaataagacacacagaaacactagccataaacaaagatagacacatttgacaaaaacataccaacattcaaatatctgactgataagacaccaccagttaagacaagctacagactgggaggagttagttgatatgtgataaagaattaggattcagaatgcatgtgaaatacctatattaaagtcagtccctagaaatctagggatgggggaagagaaacaaagagagaaggaaatacagatggccaataaagacatcaaaaggtacttaagctcactagcaatcaagaagatgcacattaaaggaatgcaatatacctttctggtcctgaggtaagcaaacatttaaaagacctgataatgtcaagtgtcgacaaacatgcaggaaaaggggtattttctcccagagtggggagactgacaagtagcttcgcccccttgtagagacatgcggcagcactagtaacactgaaagtatatacctagccgggcatggtggctcatgcctgtaatctcagcactttgggaggccgaggcaggtgaatcacgaggtcaagagatggagaccattgagaccatcctggccaacatggtgaaaccctgcctctactaaaaataaaaaaattagctgggcgtggtggcatgcacctgtactcccagctacttgggaggctgaggcaggagaatcacttgaacccgcgaggcaaggttgcagtgagctgagatggcaccactgcactgcagcctgggcaacagaatgagactctgactcaaaaaaaaaaaaaaaaaaaaaagtacatacctaaaaccaggtacaattctgcttctaggggtatgcctagataaaaactacataaacacgtgcacaaagtgaagtcacaggaatgttcacacagctttcactggagcagcaaaaacaatgggggaaagaggaacttataaacctgcccataaaagaaactatgaacacagaggtgcacttctctaatggatacactcggcagcgcaaaaggaacaagcctgacttctctgtatctatcaacatggatggacctcaaagttgaaaaaagaaaactataggaaaactacatatagaaaaaaatcattgggaaaaaaaatagattgttgggctgggtgcagtggctcacacctataatcccagcactttgaggcaggcagatcactgaggacaggagtttgagactagcctgcccaatatgacaaaaccccacctctactaaaaatacaaaaattagccagatatggtggcacacgcctgcaatcctagctacttgggaggctgaagcacaagaatcctttgaacccgggaggcggagactgcagtgagctgagatcatgccactgcactccagtatgggcaatgcagtgtgactgtctcaaaaaaaagaaaaagactgtctatgtctatatagtttatcatctatgtatgcatatgaaaatgaattagctgtgtacaaactgaatccatgagtggttgcctgagaaatggtggaaagacaaagagtaaaagaagaaaaacaacaaatacgacaaaacagtaatattgttcactgatggtgatgccatttgcttcctttttacacttctctgtaattatgaaatgtgccaaaattaaaactaaaataaatttttaaaaatttagaaatgaaaaaggggacattttcaaactgtaagccccatgggctaaaaaacaggaagaaaaaaagagctgcccccagctgaatatgtaaccatgtctgggcccacaaatcatggaggcctcacctcaaggatggtaaggggactgggcacaatggctcacgcctgtaatcccagcattttgagagggcaaggcaggcaaatcacctgaggtcagaagtttgaggccagtctgaccaacatggtgaaaccctgtctcgattaaaaatacaaaaattagccagtgtggtggcacacacctgtaatctcagctactcgggaggttgaggcatgagaatcccttgaacccgggaggggaggctgcatcaagccaagatcgtcccactgcactccagtatggacaacgcaatgagactctgcctcaaaaataaaaataaataaatggctggtaaggggacacagtaaacaccttcagcctagaattgcaaaggaaaatgcaaaaccaaaaggccagaaggaagagatggtggaagacaggaacctagtctcacaggctgtggagatgagagggacccttcaagggtaggagaggaaatgcaggtttcactgttgcctgatgctaaggggaaagggtgctaaagagagaagagtactgctacagggaggagcaaacccttctggtccacaggtcaccctcatgagctgcatttgtattttccaatcacatcctaggatgacttgcaaaagtgtttcacccaaattctcataaacattcttgcacacatcactttgtacacacatataagcatttatctaggcattctaagcacttcatggaatctgctaacaaaccagccacacatttaaaccctttgagagtctgaaggagagaccaaaggtgctgagctgggtctcagatgtttgctgacagatcttgcccaactgctcccccttcaaggaacctggggcaattcagatggcttctgtggtagatttcattgcagagaaggaaaacataaatagattgtgcacatcctcaagtctgaccaagcatgggtgcagactattattggtgttttatgtacataatgtttgttatgcagatatcctaggtggactgttaacagaggggtttgaatgcttccgtatttggaaaggctggttggggttttttagatgaaatgagatattatcattacaattattattttcccctattcctagaaataacgggatctgggcttctgtagttaaaacctcactattcaacatacttccatgaatggactattcagataatgagggatgacagcatttgatgttttcaccagataaatgctttatttcaataaatacttaacttggagggaacaataaagggacacagggttcttttgcattcctgaagatctcacttagttaaaaacacacagcagtcaaatccgagtttcccacaggaaaaaatccagagtgtggggaggggggccagccaggagcatgttatcagaaatcacaactcttcagacattggagggtgttgttatttttaattctgttttattttctcagcattaacttagataattctcagaaagcctagcataaattaacagcagagtgtagcatggtggttaacagggcttcttcgcagtgttttattacagctaacttctactcctcagagtctgattcaggggccatctttcaggctagtctagcttcactactgattattctgtcttaggatttaataatgactgtacattgtaagagcagcaaacctcatagttgcccaagttctgatgccaggcaacaatcaccttgcatcatatggttcaggcccttctgcttcccatctcacctggaccagggatagcaacactgccaagtgggaacagcatacttatgatggacttcacccaccagatttgaaactgtgggcggtttcaataatattttttaatttgagggggaggcacaaagtagagacatcatttttaaatcttgttttatatccaagtatctcacatctgcttgattcattatcttaacttaaaaataaaagacctaaaaataagtaatgaaactctttttcttcatctttcatagcagggagttaacagagtaaatataactttaatgaattaggaaaaaaccaatttaaaaaatctcccatttagaaatacagagacaactctaaaaaactgaaaacaggaagttaaaaatggctgcctcagtcattttttacaatgtaattacattgtaattacacttattacatttacattgtaattacattacattaaaagaaatattgacacaatgctacaatatgggtaactcttgagaaggcaaacattatgctaagtgaaaaaagccagacaaaaaaggctgtgccatattatgattccatttttatgaaatgtccagactaggcaaattcatagagacagaaagtacactagtggttgggagggagtaggggaaacagggagtgactactaatgggtacaggatttctttttagggtgatgaaaatgttctagaattagatactggtgattgttgcacaattctgtgactatacgagaaaccactgaattacacactttaaaaggataaactttataatatgtcagtaccatctcaataaagctattataaaaatttttttaagtggctgcatctggtgaggaggctgggcaggaggacggcagagagatgacacctttcctaagtaactccattgtcctatttctctcaggagccaccctgtccccataatcacaaaggcccctgctttgatttccttatacctctcctccatagctccaaggccctggtcagactgaagcctgaaacaccagcctgcttcccacagccctcttctttccacacccatcaccacattttggaccctggtgccgcctgatcccaagacttctgaggttctgcagcaagcattcagggcctggcctctccagcctaaaatctaactggagtcagtctcactcaaacactggtcacacagtgtgctgcctgccacccctgacccctgtggtgctgcaggaggccagacccccactcaccaggctgtgcccaactggctgatgcattcttttcacctcttggcccaggtctacgaagcagccttcccctccacagtaaaagctgagctccacacagactctgtcccatctcccgactcatcaggtgactgtgctcctgcaggcctaccctacccgtctcaggtttctcctgtcccacactgcacgtgtggctccaggtaggccgtgagatctccttagctgagtgaataaccctggaaaagggtctgggagctcctcagggtgaaggctcacacctgtccttgttcccttcacagcaggcacagcaggcactgcacagcatcagcctaaatcgggtgctaaagacatgagtgaaggtggcaatagagaagtggggctgccagccaaaagggctgcccttcatgccccacaacaagccagggagagttggagctcagtactgtggacagactggttgacactaaggctccgaatcactaaaaacggcctaattctccctacctgctctcaggaaggattaacttccagttgcttccttccctacccaaactccaactgttgtaaactggagagccgcatcaactgggatgaccagggataacctggacatcatcctctgggaacaggacagccccatctcacctgaacctgggctgctgggagcccagtggccctcctcccctcctccaggcttccctccacgtgccaggcaggatactgaggacacagagctaggaaacgagaaaaaagtcatggaggcagctctcgctgccaggagctcaccttttcttctggggggctgagaaccagcccctgcccctcccccttgaatgaggaaagagacccacttcctcattctatagatgaaggaattagggctcagagaaggttaggaaagtacctaaacacatgaatctctcattggccccccctgtgctattgggtaccatctctgagaagcagtgtctggtcacaaccttcctgggcctgaaccctaaacggccacacatgaattctcatgcatcttgagatgtcaccatcaccttactgctcactggttttctttttttttttgagactgagtctcgctctgtcgcccaggctggagtgcagtggcacgatcttggctcactgcacgctccgcctcctggcttcacgccattctcctgcctcagcctcccgagcagctgggactacaggcgcccaccaccacgcccagctaattttttgtattttgttttagtagagacggggtttcaccgtgttagccaggatggtctcgatctcctgacctcgtgatccactcgcctcggcctcccaaagtgctgtaggcgtgagtcaccacgcctggccactagttttctgattcctccttgttccagctctgcacagagacagatctggaccacctgccctaaagccccacctggtccccattctattccccagctgtggcagagcactacagccagaggccacaatatggcagcccacagctgaccaggctcttgactcaccccaggaggcccatgggtcaacagctgtcatcccccaagattggtccgtaagggcacctgcacagaaggatcaggttaggactgtgacaccaaacctagtgattcaaggcgacaaaatacaagaggaggctgactcgctaatgggcactacaaaattccataaacagagcccaagggtgtgtaaaaaaaatgcaacataagctggattcacacaggcaatgcacaggtgagtcactattaattaacaccgttttaaaattaccaaccaatgctatataagtaaaaacaataaaggtaaaaatatatatgagagcagtagagacaatattttattatatgtatcactgttgtttaggaaaccccacaaaccaccagaaaaatcccttaaaactaatgacacctctcaggagatgactataaaacataaaagttagtgtcttttatgccaacaattttcctcctttaccaccaatcagttctaattttgtaccaagatagacagacccccttccatcctcaaaagtcctcagcccatcaccagctctgacccatgactgcagcagctaatgataggggaggcccaggagaaacacaacttggactcaccccaggaggcccacgggttgatggctgccatcccgaggactgattgaccaggcacctgcccaggaacacagcaaatcccaacctagtgacaaaagtgaaaaaagacaaaactagtcctttctcacagaagaccaagtgggaacaaagaagggaatccatccaccgaagcaacaaaaaaacttgtaaggagcatcgtaagaaaagagaatttacatgtcaaaaaagtaacacaattcctggagagaaatgaaaggtaatttgcataagctggaaaaaagagcatgatcctgaatgagagggtacaaatttgtcagctattcccaagagacagccagtcacaacacagatggaacttttggattaatctgacaattattgtaaaatcaacttgcaatcctcatatattagtggttgcctagagctgggggaaaaatgaaatggggagtgactgcttaaggggaacaagggtttctttgtggggtgatgaaatgttctaaaattagataatggggatgattgcacaactttattaatatacaataaaaccggtgaattgcacacttttaagtgcttaaagtgaacattatgttatgcaaatttaatcccacctccaaaaaaaattcacctccaagatttactaagcctaagcttgtgtgtgtgtggaggacttagagatgggcctggcgcccagacccctaactcctcaggttccagatctttgtacaagtcagcaacctctcgaatggattcctgggtatgtgtataaagcactagaacacacagtgggcctcaggagcaccggaatcagcgcgaaaacgcagaatgcaaaccgtactttgcaccattatttgcaacttgacagtgaccgccgccgtcactgcatgtttaagggaacccggagctgtttccaacccaggtctgacgtccttcacagtgctttgtgtgaactggcagggggagaaacgacggctggggaacgaacggggttattcgtcccatcaatggcctcagaagcatccttatcacctgcttccagagctcccgacccaaatttcctcctcaagaccgacgcggccgcgacgctgcaaaagctcgtcccggcctcacctggctcgcggccggcggtcccccttgaaggcggcgcagcaggatcggggtctgcccgcctggggcgtttggcttttgtcccgcgccgaggtccggcccaggagtgcgcttgggagctcccggcgcggcctcggggacaaaggcccgcggagccgacgtgcagcagagttcacccaggcccgtccgaccagaaaacgaagaacgcccggaggcgggaggccggaggcaggctgctggctggagaaccgacggcaacgacggcgcaaagccggcgcggaaagggcaggcgcaggacccaccctgacgccgcctctcccagccggctctcctgaccccccaagccccgcagctacggcggccccacagcctgagcaaaggcctcacctcagccgcggacaatggcggctgcttccccggcgtcgaccggagcgcgccgcggggtctgctgggagctgtagttccaggcgggcacttccggcgtcgggcagcggcgccgccatgacaggttcctgggccgcgccgcctcgccctgcctgggcggggttgggacctttctggcacctgcgtcgaagccggcggcaggatggactttgttgtcccggtcccagaccaccctcctccaccgtcgcctcccactgcaaaaaggcctgggtaagtcgcggccccgcgggcctcggtttgcccatccgcaaaatggcgcctcgtggtaccgggtttcccgggaggagctcggcgagttctcagcgctctcgagggatccttccatttggcgttcgcaagattgtgagaaagtgactgctgttattctctttaagataaggaacctaattcgagctacccttctctgtgaagctcgacggctgagaacgtcagggctcgttcccaagtctctttccagaggccaggctttatgggagcatgggttaccagcgacgcaccctgtgagttttcctctatcgatatgcatggagcggttcgggagcggtggctcattcctgtagtcccagcacttcgggaagctgtggcgggaggatcagttgagttcaggagttcgacaccaccctgggcaacatagcgagaccacatctctacaaaaaaaatacaaaaattagcccggtgtgatggcgcgcgcctgtagtccccgctacttaggaggttgcggtggaaggattgcttgagcctgggaggtcaaggttgcagtgagctatgatcgcaccactgcacttcagcctgggcaacagagcaagacccggcattaaaacaaacaaaaacgggccgggcgcggtggctcacagctgtaatcccagcactttgggaggccaaggcaggtggatcgcctgaggtcaggagttccgagaccagtctgggcaacatgataaaacctcgtctctactaaaaataccaaaaattagccgggcttggtggagggcacctgtacccagctacttgggaggctgaggcaggagaatcgcttgaacccgggaagcggaggctacagtaagccgagatcaagccattgcactccagcctgggcagcagggcaagactctgtctcaaaaaaagggactgagggactgtaggtggtgataccaaagaaagcatggccatttaggaagctagacttgagtgagcagtgggcaagagagattttgaagatatttccactagtaatggaggatcattttaaaaagctggcctgtgggttgggcttttgttgttgggtggtgttggcactcactgtgggtgggcaaaggggagtagccctttcagagggagaggaaaagttcaagtaggacaggctgaattcaagggagaggaaaatttcaagtaggacaggctgaattcgagggagaggaccatgagagaggtaaggtggaaggggcaaggtgttgggacaggccccagctggcaggaaggtgaacccagtcagagtgggcactgagaggaaagcaatctatggatggtacagccacaatttccatctcaggatcaagcagagaaagagaggctggagaaggaagagtgacagaagtaagaagagagtgtctctccacttccactccagccccctacagctcatcctccagcaggcagccaagggcacttttaggatctcacatcaggtccttgcctcacattctgcactggcttcccaagtaattaaagtaaaatccaaattccagctcacagcttagaaaactcagcaggactggcctctgtcctatcccacaccccacctcagtccctcaagctcatctcctgtcattcctgcccatttctggaccccagccactcctcaaacagggtaagtccattcctgcttcagggcctttgtacgtattgtttcctcttcctggaatcttcttccttgtacagccccagggttttctttttttcatccagatcacagcacagatgtcacatcctggtaacagccagctgtgactcatctccctaattctcaattgtattactctctttttattttcttcgtatcgtaactgatagtctcatacagtacagaagccaagttttaagatatgcaatcaccaaatacctgctacacaaacctcaatgttcatataaaataagactagaattcatattctaaagagagatgaggtagctctgttcacttttgagagggaactcaaatgagagagatacctttgacctaaaggtgtcaggaaaccagatgaagaaaaacacccctgctatgatttgaatgtttttatcctctccaaaattcatgttgaaacttactccccagtgcagtagtgttgggaggcagggtctaatgggatttatggaggtcataaggctctgctgtcatgaatggattaatgttgtaaaccaaaaaataaaattctaagccccccaccccccaaccatatgaatagacccctcctctcagccaagggcattccaaagttaatttgaaaaatgagttcgggccatgatgggaagcagaagctggacttgcctcattataccctcctcccttctagaattagtgatagaacagactctttaagtctgataagaaacatttacagtctgttatctccggaggtttcatctgcttggtaaaaccttgagttccacaaccccagacattcctttctattgacaataactctttaaatcaattggcaatcagaaatctttaaatctgcctataacctggaaactttctgtaccagtatacatcttatatgtattgattgatgtctcatgtctccctaagatgtataaaagcaagctgaaccctaaccaccctgggcatgtcctcaggatctcctgagagctgcgtcaggggccactggtcaccatatttggctcagagtaaatctcttcaaatattttacagagtttgactcttcgtcaacaatgccattgtaaaaggttcatggagagattctgcatgtgcttgcattctctttctctctctctctttctttctctccccccacccccaccctccaccaccctgccctttaccttctgtcaggtgaggatgcagtgtccaaggcaccatcttgaactcatcatcgccaaatatgtgagcaccttgatgttggacttcccaacctccagaccgtaaggcagtacatttctttgtaaattacgcagtctcagctattctgttacagcagcacaaatggactaagacaacccccgagataggaaggggtaaggtaaatgcaatgagagttggggttttcgatcttagtccagtaaaggagctggaactgttctgtataaacaaagggcaaggtaattgctacatagattcttttcttattattgctgattcttatcctaaaataaaggacattgccactacacatcctctagaatgaccaaaaataaaaatacagcatcaaatgggacgacatggtgccaactggaattctcataccctgctgatgggagtataatgtggtacagtcactttggaaaaaagtttgacaatttcttataaaattatacataaacctgtactatgacctagagattctactcctgtttgttcaaaagaaaggcaaacatctgtccactaaaagatatgtacaagaatgctcacagtggcattatttatgacggtccaaaccaggagataatccaaatgtctgtaaccaagagaatggataaagaaattttgatacgtcaatttaatggattactacttagcaataaaaataattagccatgctgggcgcggtggcttatgcctgtaatcccagcactttgggaggctgaggcaggtggatcacctgaggttgggagttcaagaccagcctgaccaacatggagaacccccgtctctactaaaatacaaaattagccggggtggtggcgcatgcctgtaatcccagctactcgggaggctgaggcaggagaatcacttgaacccgggaggtggaggttgcattgagccgagattgcgccattgcactccagcatgggcaaaaagagcaaaactccgtctcaaaaaaataaataaataataattagccacatatccacacaacaatattgcattatcacaggtatagtgataaatactgtatgattccatttatatgaagttcaagaacaggcaagtaatccatgatgaaagaagtacttacctctgggggtggcagcattgactaaagaggtacaagggagtcttctggggcctggaaatgttctatatcttgatctgggtggtggttacacaggtatacgcgtgttaagaaatcatcaggctgtatacttagtgtactgtaatggcattacactgtctttcaattaaaatgtgaaagaaaaaacgggggtgtcttttgcttccacatttgtagccccagcttctgtatctcctgcgtgataatggttggatgaattaaaaggtaggaggaatagaagaggagaaaagcaataggaagaggaaggctggaagaaaagcccagctccactgtctcacttgggtgtcactgggtactggggaatttggaagcactagggaacagagaggaaggtgctcccttaggcttccacttctcagcccagtagtgagaggctatgaagctgttgccccctggtgggggacaagtgagaccagtgagagagggtttttgccttagaattgccccttccctggagacagcagcaagatgaaggcctctcaagaagtgcttcatcctctggaaaccagcggaggaaatgactttcccaagagaaggatcatacatcactcaatcatcagcaaacatttatgaagcacctgctctgtgccagaccctaaagtgaaaaaaaacaaacactgcacttacggaagcacgagataaacaataaacataagtaaattaaagagtagttagaaggcaacaactttggaagaaagaaaaaagagtaggtgatgtagtgcccagatgggaagggcaagttgccgtataaaattgggtgctaagagtgagtcagagtcacctcattgaggtgacatctgaacaaggactggaaagaagggatgcagatggctgggcgcggtgcctcacgcctgtaatcccagcactttgggaggccaaggcgggcggatcacaaggtcaggagatcaagaccatcttggctaacatggtgaaaccccatctctactaaaatccaaaaaattagccaggcgtggtgacgggctcctgtagtcccagctactcgggaggctgaggcaggagaatggcgtgaacctgggagacggagcttgcagtgagccgagatcgcgccactgcactctagcctaggcaacagagcaagactccgtctaaataaataaataaataaaaataagagatgcagacatcggagggaagagctagaacaaaagccctggtgtgagggcctgcctagtcagctgcgggaacaacagtggtcatagaggcaataagggggccagatggtagagaaagttgaaggcatcatgagggctctggcagggttctgagtagagcattgatgagctctagcctctgtatggagagtaaccaaggaaagcagtagagtcatgtgtgaaaccaatgtagtaattaggtggaagatgatagccgctcggatcagattggtgatcagtggctggattgcggacatgctgatactttaaaggtagagccaacagaccgtaggttcaaggttttgcatcataaggggcaatatagcctgtaatgttcagaaggagtcaagaaataaaggaggcctctcaatacagagctattcaccaagggccttgatggggaggaagtaagttgcaagtgtgtggagatactgctcccttctggcccaagctccctcccactccagttacccagtgttgcgggcagcaccctattctcttctgggaggtagcggaggcagagccacaccatcattttggatgcacctattatgggaggctggagtgcaatggtgccatcttggctcactacaacctccgcctcccaggttcaagggattctgcctcagcctcctgagtaactggggttacaggcgcgcgataccacgcctggctaatttttctatttttagtagagatggggtttcgccatgttggccacgctggtcttaaactcctgacctcaagtgatccgcccgccttggtcttccaaagtgctgggattacaggtgtgagtcaccgtgcccagcctggacttgccttttacctcatccgtggtgtcttttgaagaaaaagattctttagaaatgttttttctttcatagcttgtgttttatgtattactttcaagatcccaactagatctaggtcctaaaaatagtatcctacctattgtttttttaatcaacttaattgtggtataattgcacactgcagataaactgcacatgtttgaagtgagtaatgtaagtttttttgtcttggagccctgaggtaaacttttatttcttagctgacaggacttccacacccatgctcctctcggcacctttcacccagcccaagcagcggcggcccagtggtggaaaaggtgccacggccaaacggattggagactcaccccgcattctaggccggagaagcgggcgggcttgggatgccggcaggaggcaatgactctccccaggcgctgcatcctggctccggggcacaagcgcctctccgccctgacgctgatgctcgtctggctgcccgttctttggcatcaaaataccagacgatggtggcgcaccctgtggcctgggctgcctcacctcattcggtcccgcctagaaagaccagaggaccagaaaaccagaagcctgtcagagcgactagaggctggctccagccaacagccgcgcgcctcagcgtccacgagggttacctgggtaacgcgccgcttgggctcggcgcccagccgatgacgtaacccgcgcttgcgtagtggcgccgccctgatgtgtagtctccaggccgccccgaacaccagcccagcgggtcctggacccctaggtcatgtggctacagtggaatccaggcttggccgaatccaggacgaccaggccagacccaccggcagtaccttgcccgcccgctttagtcacttgctctaggtggatctaaacctctaggcctgggcgcggtggctcacgcttgtaatcccggcactttaggagggcaaggcggcagaatcgcttgagcccccggcagcatggagaggtggcagaggcagggccataccatcatcttgggtgcacctattatgggaggctggagtgcaatggtgccatcttggctcactgcaacctccgccccccaggttcaagcgattctgcctcagcctcctgagtaactgggatcataggcgcacgctaccacgcccggctaatttttctatttttagtagacatggggtttcgccacccccggcagcatgggtagacatggccctcccgcctgatctcttaaaaaaactttaaataattcgtggggggggttaccgcccacctgttttcccagctactccggaggctgcggtggaaggatcacctgagcccaggaggtcaagactgcagtgagctatgatcctgccactgcactccagcctgggcgacagcgtgagatcctgtctccaaaataaataaaattatgtacatatgtatgtatatttaattacatatattttgtataatttgtatatagtttataatatatacatgtatgtgtacacatacataaatatatgcgtaaatatatatatgcatatatatatgtaataaaatattaagaacccgcccagccgaagccacgggcgctttgggccctcggttggcctcagccacttcagtcgcggccccggggatgttgggggaaccctgtcaggcagcaagcgcgtcctccagccccgggcggccggcggctgtgcacccgccctccctccctcccacggcgctcgcctgcatgcgttttggcaaatatctaaacccgcaaaaccatcactagctctggtttcccaagatccttgaagcccctccgttcagcattccacgcccctctctgccctgctttcaaaccaccgccaatctgctttctgttatatatacagattagtttggattttctaacagttgtatataaatgcagtgacacatttgagtgtactcttttgtgatctggtttattttactcagcataattattttgagattatccattttgttgcatatgtaagtagctcattccttctattgctgagtggtgttccatctcatggatgcaccaccattgtttatcacgcatctgtccgtggacatgtaaactgttttctatttgcggctgttaaaaataaacttctgtgaacattcgtgtacaagtcttcctaaggacacgcatttcctttcctgttggataaatgcctaggcgtagaatggctggatcatataggaaatgaaaattcaactttttttttttgagatggagtctcactctgtcgcccggactggagtggagtggcgcgatctcggctcactgcaaactccgcctccgcggttcacaccattctcctgcctcggcctcccgagtagctgggactacaggcgcccaccaccacaccaagctaattttttcattttagtagagacggggtttcaccgtgttagccaggatggtctcaatctcctgacctcgtgatccacccgcctcagccttccgaagtgctggattacaggcgtgagccaccatgccccacgaaagttcaacattttaagaaactctccatttgttttccaaagtgtttgtaccgtttcacattcccaccagcaatacacagatgctcctgaactacgatagggttaggtccaaataagcccatggtaaactgaaaataccatgaatcaaatgatttacaatacccaaataaatccgtcaagttgaggagagtactgaatttgtatagcttgtataccatcataattttgaaaaatcataagttgaatcatggacaaggactgtataagagttgtaattcctccatatccttggcaacatgatatggtttattttttgcaattctaataggtgtgtattgggtattgcactgtagttttgatttccctaattactaacattaaacatcttttcatatacttcctttccatttgcatattttgtggtgaactgtgttcaaatgctttgcttggctttaaaaaaaaagtagctgaaattgcttgttttcttattgttgaattttatcttttattctttttttttttttttttttttttttttgagatggagtcttgctctgtcacccaggctggagtgcaatggcatgatcttggctcactgcaacctctgccacccaggttcaagtgattctcctgcctcagcctcccaagtagctgggattataggtgcacaccacgacacctggttaatttttgtattttgagtacagacagggtttcaccatgttggccaggctggtcttgaactcctgacctcaagtgatctgcccatctcagcctcccaaagtggtaggattacaggcgtgagccaccacgcccatcctttaactatcttttaatccacacagaagcccagagctcaaatcaggggccctgatatcttcaacaaggcctggctcgtgggtttatggcgcaggtctgaggagctcctggctccacgtttcccaccgatcccagtgtcctcgcctcacccagtctggggcattccgctcgggctttagcaggatgatgtaacatttggggcaaagatgccacccagcagccctgccatggaagccaggatggaaaagatctccacggccacagtggacttgccctgtgcgctgtggtacaggggcaggaaggttgtccagaagctgcagaacagcagcacgctgaaggtgaggaacttggacttgttgaaggcgtctggcagacccctggccaggaaggctacaaagaaggtgcccccagccaggaggcccaggtagcccagcacacaggagaaagcgacagcagagccctctcagcactggatgacaatgtggctgggctctgaggccatgtccccatctgggaatggtggggaagtgcccagccagatgccacagagaacaacctgcaccaaggaagcagcaaggaccaccgaggtggaagcgccaggtcccaggcacacccagaccctgtcacctggtgaccctgaaggccaggacggaagagacagccatggtgaacacaacagcaactgtggtctggtagaggcggcaggtggcagctgtgggacaaccaaggcaaggcaagggacagagggcacagagggtcagggaggtgagcggcgtgcagctgagagctctgttgttggccccgaccacaggtgtgtctcggtgcttcagaacagtctgaggaccagcactgccaggctggccagcatgagcgccaccaaggcgagcatgagtcccagggggtcgtcaaaggccaggaaggtctctgtcctgggcaggcagccatctctggtgcggcttgagtactgctcctctgggcacagaagacatctcttcgtacctgtgggagacacacatccctgcgtctgccacaggatcgtaatgacaccagccatgtgaaggaaggctccctatgcactaaaccagccttaccagcgtttcacacctattcattactgattgaagggggcctgcccctccacacctgtgggtatttctcgcaaggtggagacaagagactgagaaaagaaataagacacagagacaaagtgtagagaaagaaaagtgggcccaggggaccggcactcagcatacagaggacccacaccagcagcagtctgagttccctcagtatttattgatcactatctctaccatcttggcaagggggatgtggcaggactacacggtaatggtggggagagggtcagcaggaaaacatgtgagcaaaggactctgtgtcataaataagtttaaggaaaggtgctgtgcctgtgatgtaaccaagcaagttatagagaaacgccacactttgagactaattcaggagtcctttatcagccggtgaccgagagatggctagtgctcaaaattctctcagccccgaagaaggggctagattttcttttatactttggtttagaggagggggaacctagctgtagcaatcttacagaagtaaagcaggcaaaaaaaaaagttaaaaagacaaatggttacaggaaaacaaacagttccaggtacagaggctttaaatccatcacaaggtgataggtgcgggggctctgggtgctatctgccagacacaaacgcgggggctttagggtactattaccccagtgaattcctggcaactgcagacatagcctgccacagtaccttatcagttaattgcactctttgatatgctgagagtcagcttgctcaagttaagtccttgaggaagggagtgggtaaggagcccttgaggtcttgcaaatgaaggagctaaatggagtccatccagctttctcagctaagagagagtattcatattaaaacaaggtatggtatcacacctggatgtgcacgtaggccagatttatgtttgactttacccaaacacctcagtgcagtaaagagcagtactgccaccagcatgtctcacctccagccgtaagacagttttctcctatcccagtaaatggaatgtacaatcaggttttctaccgagacattccattcccagggatgaggagcaggagacagaggctttcctcttatctcaagtgcaaagaggccttcctctttcactaatcctcctcagcatagaccctttacaggtgtcaggctgggggacggtaaggtctttcccttcccacgaggccacatctcaggctgtctcaggggggcaaaccttggacaatacccaggctttctcaggcagaggtccctgcggccttccgcagtgcattgtgtccctgggtactcgagactggagaatggcgatgacttttaccaagcatactgcctgcaaacacatgtttaccaaggcacatcctgcacagccctaactccattaaaccttgagtcaatacagcacgtttctgtgagcacagggttggggctagggttacagattaacaacatctcaaggcagaagaatttttcttagtacagatcaaaatggagtttcttatgtcttcctttttctacatagacacagtaacagtctgatctctttctttcccccacagatttataattttgagataccagtgatgggatgggccacattagatcctgaggcacaaggaaaaatacacgccccgtatacatgtttgcatgtttttttaaaatggttaattttttccaagtagtaacaacaactgctctttttgttttgttgtttgagacagggtctcactcttgacacccaggctggaaagcagtggctcgatcacagctcactgcaacctccacctcccaggtaaagccatcttccccctcagcctcccaagtagctggaactacaggcatgcaccaccacacccagctattttttttattattgtttttgtaaagacaggggcctcaccctgttgcccaggctggtcttgaactcctggactcaagcaatccttccaccttggcctctcaaagtgctgggattacaggtctgagccaccacactcggctgcactcggacttttgaaccataaaaactgtgagataagaaatgtgctttgtttcatacgcttgtggtaatttgttaacagcagctatagaaactaatgcagggagcaactgggcattgcctacactcacagtgggagtgtgaactggaagcaccaccagtgtctgttaaagccacaggtatggcctggcatggtgcctcatgcctataatccctgcactttgggaagctgaggcaggaggattgcttgagctcaggagttcaagaacagcctgggaaacataatgagtccctgtctctataaaaataattttttaaaaaattagccaagcatggtggggtggcatgtacgtgtagtcccagctactcgggaggctgaggtaggaggatctcttgagcccagatcaaggctgcagtgaaccacgttcacaccactgcactccagcctgggcaacagagtgagacctcttctcaaataaaagaaaaaaaaaagctgcaggtatgtctacctgtggcccagcaatgccacacccaacagaaattcacctgtatgtccccaaaagacacaacaatgagacacggctcattgcagccgctgatcagcaggcttctcaaatcccccatccctgttggagtggatgaagcagccgtggtgcgtccgcacaatgggatctcaccagtcattagaacaagagatccacaaccacacataaccaccactaggatgaatctcacaaacaactgggaggaaaaagcaagacacaaaagaacactcactgtgtgattccacttataggacgtttaaaaatcaagcaaaacccactgacaccaatagaagtcagggcggtggatgggtcgcagggagaagacaatggctgggaggggtatgaaagcttctgggagggccaggttgtgccctgtttcttgatgagaggaccagggacacggaatgtttgccaggtgagaattcattgggctgcacgcttatgatctatgcatttgtctatatatttcaataaaacatttacctaataataatgacctttattcattctctttcagccactgttaataataagtgccgagaccagctcagtcggggagaccctaacctagcggtgctagaggaattaaagacacacacacagaaatacaggggtgtggagtgggaaatcagggatctcacagccttcagagctgagagcctccaacagagatttacccacatatttattgacagcaaaccagtgataagcattgtttctacagattatagattaactatgtgtttggcaaagtgtattcactgggcagatcctggaatactgacacactgaaaaatactacagaaaaaactcctgatggagactctgattcagcttgtgtgacactaatattttcattttgggtggtgagcaaatgtctttcctcactcagagaagggctcagtatccctaaacagcatagctgagttatgactggcctaatttagagctgcaccaacttcatgtaccaaatagggacaccgctggcctctgtgcttccctctgactcgaatacaccagaactgggatcatttctgcaccctggaaactgacctagaggtcctcctttgtcacatgcactgtcattctgtctcccagaggggctcacgggttgactatgcctatgtggacaaagtggaatcagccctcagtggtcttctgtccatagacaacatcaaattctgtaattaaatctccgttggcatcaaacatgatctctgtcccatcaggggtcttgaaatgcacgttcttgagaggacgaagcagctggggaaggatggatgacactgtagatgggcagggccagtcccagggcctgtgcaaaatgcatcaggtcctcagccaccgtggtgagcaggggctgcctcaggcagggccaacgtatccatgaggcacgggagacccagggctgtgatatttgcagggtcccatgaaaatgttctaatgttaactgcttgtaaaagcaaagaaaaaaattaaaaagtaattaatgggccatgcacggtggctcaagcctgtggtcccagcactttgggaggccgaggcaggcagatcacgaggtcaggagctcaagaccagcctgaccaatatggtgaaatgccgtccctaccaaaaatacaaaaattagccaggcgtggtggctcacgcctgtaatcccagccactcaggaagctgaggcagaagagtcacttgaacccgggagacggaggttgcagtgagccaagatcatgccactacgctccagcctgggcgacagagcaagactctgtctcaaaaaaaagtaataatgaacatataataatgagtccaacccaggatatattcatctttagaccaaggcaatggtaaaattgaattaagaatttttttttccacggaggaaggaacgcacaaaagccacagtgtggcccctgctccagggattccgtctgagcaaacacttcctccttggccttcccatcacactccaagtggagtaaaatcctggcgggacctacacaggtcagtccctgaacacctagacatcctgatccctcagtcacaaacctagcatggacttaagacccctcatcctggccaggcatggtagcttatgcctgtgatcccaacacttaccccaaagtggacagatcgcttgagcccagaagtttgagaccagcctgggcatcatggtgaaaatacaaaaattagctgggcgtggtggtgcatgcttgtagtcccagctactcgggaggctgaaggatcgcttgagcccaggaggttgagactgcagtgagctgtgaatgcatcactgtattccagcttgaacaacaaagcaaggcactgtcttaacacaaaacaaaacaaaaaattcctcagcccggcacggtggctcatgcctgtaatcctagcactttgggaggccaaggtgggcaaatcatctgaggtcaggaattcaaaaccagcctgaccaacatggtgaaaccccatctctactaaaaatacaaaattagccaggcgtgatggcacatgcctataatcccagctactcagaaggctgaggcagaagaattgcttgaacccaggaggcagaggttgcagttagctgagatcacaccattgcactccagcctggacagagcgaaactccgtctcaaaaaaaaaaaaatcttcgtccagtgctcctgctaagatgtggcttagggctgtgaatacaagatatcctcactgaggagcactgcccctgtcctccccaccaggagaccaagtgagtttcctgctgtctccccttccctgaatcatctactccacagtttgtttttgagacaaggtcttactctgttgcccaggctggagtgcagtggcaccatcatggcttgctgtagcttcaacctcctgggctcaagcgatcctcacacctgagccttccaagtagttgtgactagaggcgtgcaccatcacgacttttttttttttaaagatagtctcgctctgtcacccaggctggagtgcagtggtgtaatctcggctcactgcaagctctgccctcccaggttgaaggaattctcctacctcagcctcctgagtagctgggactacaggcgcccaccatcacgcctggctaattttttgtatttttagcagagatggggtttcactgtgttagccaggatggtctcgagatctcctgacctcgtaatccacctgcctctgcctcccaaaatgtgggggttacaggcgtgagccactgtgcccagcccatgcttggctgatttaaaaatttttttgtagattcagtgtcttactgtgtttccctggctgatcttgaactcctgggctcgaatgatcctcccacattggtctcccaaagtactgggactacaggcgtgagccaccatgctcagccccactccacacgttcgcctctcaccagccagggctggaagtcccaggcatcggcacacccctggtccccatgcttgcagcctgccagggcctgggcgatggcatagaccactgtgtaggcgatgtgtactttgctttccttctggaaagggtagtgctcaaccctcagactctcatttcctgagcagaactggactcctgcagccgctgtgcttttccctgctggcccccagctgctatggggctatgtgcacttgaaggtgacctcccagaatctccatatgaacatgtcttctggggtcctggcaaggcgcagggaagtcggggggctggctgttgcaaagcaggaggctgaatgagccctgcagaacccagaaggcactggcacagtcaggaccagcgccatgtgcagagtgtcccagctgacacagacctggcccaggatgcctcggcctgccaggcactgcaggatgagtctgaagtgctagctgttaaggaaaaccaggatgatggtggccgtacagttctccatcagccagatgatgtttttcatcttcagggactcccgggtggggatgcagagttggaattcaatgcagaccccagcctggcccagctcctggacgaccagagacctgccctgcagctcaaagtcgtccccctgcgccaggacgctcacccaagaccatcggaagtgaagcatcagctgcaccactgcatgggtggtcgtgaggtgactgagcagggtctgaaagaaggatgggaactgggtcctgtcgctgaggctggccagtgtggaggaggggctgacctgtgcaggaagaggccagggcaatggggaggggtgaggagcagctcaggcacctgctgaccaccaggttcaaaagaaagccaggttgacccacacgtccctggtggccctgggtgtgtcccccaattttgtcactgaaagctcacacctataatcacagcactgagaggccaaggcgggcagatcacttgaggtcaggagttcaagaccagcctggccaacaacatagtgaaaccccatctctactaaaaatacaaaaattagccaggcatgatggtgggtgcctgtaatcccagctacttggtaggctgaggcaggagaatcgcttgaaccctggaggccgaggttgcagcgagccgaaatcgcaccactgcaccctagcctgggtgacagaatgagactccgtctcaaaaaaaaaaaaaaattcccacataagtctgggcatggtggctcacgtacatcccagggctttgggaggccaaggtgggaggactgctagagcccaggaggtcgagactagcttgggcaacacagtatgaccccctactctaaagagacacacacagaaagagagacacacacacagagagagagagagagagacagacacagagacacacagaggaagagacagacagagacagacagagacagagacagagagacagagtcagacagagaaacaggagggaaggcaggcaggaagggaagaagggagggagggagggagaggagggagggagggagggagggatggaggaggggagagagagcgagccaagcaggcacagaaaaaaaaaaaaaggagaaaaggaaaggaagaaagaaaaaggccagatgtggtggctcacacctgtaatcccagcaccttgggaggcagaagtgggcagatcacttgaggccaggctggtctcaaactcctgacctcacgtgatcggcctgcctcagcctcccagagtgctgggattacagttgtaagccgcagcacccagccccaaggaataattgaacttaatgttcattcctctcgttttgcccacttcaaacttacgtttctgctcctttgccaagctgggtttttgtttgttttttttgagacagggttttactgtcacccaggctagagtgcagtggcaggaacacagctcactacatcctccacctactgggctcaagagatcttcctgcctcaggggactacagatgtgcaccacccaccacccccagttaaaaaaaattattttgtagagatggggtctatgtttcccagcctggtcttaaaattcctgggctcacgtgatcctcctgcctcagcaggcctggggatccgattctagttccggtttgcacagcgccgacaactctggggctacaggctggagccaccgtgcggggcctgggattcggactctagttccggtttccacagcgtggacaactctggggttacaggctggagccaccatgccgggcctggggttcggattctagttacggttcacacagcgcggacggacagttcttcactggcagtggcaatgactcggaacctacttgtgttgtttggccacgctgtgatctttgtcagtttttgcctgcttgtcgatttgccaatgaagagactactcttcgtgccccggaagataaagttctatgaaatcggggtcaacgaggttttgtgtctgtgtttgcttctgacctgtggctgaggcacaggatgaaactgctcggtctctggggtctgttggatcagagactttaacacgctcctcgtgtgggtgcaaaacattctcctaccgccagagggtagtaaggaaataggctatgcaaaggttatggggtctgaacggaacggtgctctggtctgattggtttacacagacccataaggctgacgcaacaggtagagctaacagatttgaaaataaaaaaacaggatacccaattaagtttaaatttcagataaattcatctaatattttagcataagtatgtcttgtatgtcctgtgcaatatttgggaccaaattctactaaaaaggactattcattgtttatctgaaaaccaaatttcactgggggtactgttttatctggcaaccctacaggtacaggaaaacagcttcttgagctgcagtcaagaaatgcagttgcagctgcacgcagtggctcatgcctgtaaacccaacactgggaggctgaggtggatcacaagcccaggagttgcaggccagcctgggcaacacagggagagttttgttttgttttgttttgttttgttttaaaaaaggccaggcgcagtgtctcacgcctgtaattccagcactttgggaggctgaggcgggtggatcacctgaggtcaggagtttgagaccagactgggcaacatagtgaaaccccatctctactaaaaatacaaaaattagccggtcatggcggcgggcacctgtggtcccagctacttgggaggctgagacaggagaattgcttgaacccagggggcagaggttgcagtgagccgagatcgcaccaccgcactccagcctgggcgacaagagtcagacttcgtctcaaaaaaattcaaaaaggaaaaaaaaaattgagtctctaatcctttaaatgtgcttgaattaaaaggaaagaaaagaaagtctacatatagaaacttctagttcagaagcattttatgtaagaatccaagtgggaagtaatcaaggtgaattcttggaaaaaaatcagcctggcttgatactttggggttaaaagcacctagaatagctatgcggttatttgcagaggttctatagaaatcaactctcctttttatcaggataggactggactaaattgatcgtacgatcaagcccatacctgaagtgtcacacctcagaataaactccccaatacatgacaacccaccctgaaggagtaaggggtgaaggggtgagctttctttgtggccccaacattcacaccgccccaggaaaacccttccaacctgttctgtgatttacagggccccctgcttcacaggtaggaaggcaggcctctcccccagcaggccagcaaactttgcaaatttaaggcgttcaagggcagaggaatcctgtaaacccaaatttacaggtttctcagtggaacatgaatctattaaattggactcgtcatacaatgctggtgggaatgtaaaatggtgcgctgctttggaaaacactccagcagctcctcagatagttaatcatagcatgaacatttggcccagaaattctacccatacaaccaagagaattgaaaacacactgaacatacacacaaaaacggatacataaatgttcatagcagccctattcacagtaggcccaaaatggaaacagttcaaatatacatcaactaataaatggatacacacgacatgctctattcatacaacggatttttaagacagggtcttgcactgttgcccaagctggattatagtggtacgattatagctcactgcacccttgacccaccccccccgccccccgactcaagtgattctcctgcctcagccttctgagtacccaggactacagctgcatgccactaatttttttttttttttcctgtagaaatggagtctccctatgttgcccaggctggtcttgacctcttgacatcaagcaatcctcccaccttggcctcccacagggccactatacccagcctatgatggaaaattaatcaatagaagggaacgacgctctgacacaggctgcaacgtggatgaaccttgaaaatatatttagtgagaaaagccagtcacaaaggaccacacagcgtatgattccgtttataggaagtatccagaaaaagcaaatctgtacagacaaaacatacattagtggttgccggcaggtggagctgatggaaactgctggctaaaggggttggggtttccttgtggggtgatgaaaatgttctcaaattggctgtggggatggctacacaactcgaacataccaaaagccatgagtgagttacgcggtatgtggattatatctcaggccggaggactgcttgagcctagcaaatcgaggctgcagtgagccgtgatcatgccactgcactccagcctgagcgacagagaccccatcactaaaaaaattaaaatgccccagcacagtggctcacacctgtgatcccagcacttcgtggggccgaggtgggcagatcacctaaggacagaagttccagaccatcctggccaacgtggggaaacaccgtctctactaaaaatacaaaaattagccgggaggtggtagggggcgcctggaaacccagctactcgggaggctgaggcaggagaatcgcttgaacccgggaggcggagattgcagtgagctgagatcgtgccactgcactccaccctgggaaacagcaagactccatctcaatacacccacatacatacataaaataaacagaaaaaaaaagttgcctctagacatagctactattatgggaatgacacccgagggcctgagagtcaggaggccccagcggggcggggccgtgtggaggctggcggcacaagccctatggcctggactcaaaacccagcttcagcgccccagtgctgggtgagctgcaacgtgtcactgctagttccctcaatctcagtgtcctggtgaatgcagcagcgatcaccattctcttacagagaggtcatggtgagggggaggatggcgtcaggctgtagggcattggcggggagccaggaccctccgtggtagggcctcagcgtcacccccattgtggccaataccacagcaaatattaggggagggtacggctctgagtacttacctggagaaacctgtagagtcccaggagcctggccattggcatagacaacgccaagcatgtttctccaaagcagctccgagagcgctgggcccagacgtgtagctggggatgggctcctcctgcccggtgagaaagctcatggtctcatggagtgctgcgtgcacgaagtccccctgtgtccagaattggttccttccagtgggttcttggtgtagctgacttcaacaatgaagctgcggaccctcacggcgagtgttactacagttcttatctggagttgttcattcctcccgttggattcgtggtcttgctggcttcagaagtgaagccacagaccttcgcagttagtataacagctcataaaggtagtatagacccacagaaagagcatcagcaggatttatcgcaaacagcaaaacaacaaacttccacaaactggaaggaaagcccaacagactgccaccgccggctcgggtggcctgcttttattcccttatctggccccacccacatcctgctgattggtccattttacagagcactgattggtccgttttacagagagctgattggtccgttttgattgagtgctgattggtgcgtttacaaacctttagctagacacagagtgctgattggtgcacttacaatcctttagctagacagaaaagttctccaagtcaccaccctacctggaagcccaaccggtttcacctctcacccagagttccggatggagaagcccagcctgaggctggggagcaggtgggcgtccctgttgatctcctccatggcaaatgtgaatccttgggcttcccagtagccccaggtggaaacgctgagggaaggagaagcccaggcttaccgcatgctgtagctgcagaggctatggcttatgcacactcaaaggggatgaggccacaagtctccacaagcgcttgtgcacgatgtagcctatacatcagacttgacataactacatcttagcaaaagactccattttatatttcataggacactctgccatcaaggataggatgttctgtttattaaacaacaaaaaaaaaagactgcacctaaccaggtaaggacacaagcacactcttccactgccagttctcaccaggggactactaggtgactataaaagattaggccttctcgggcacggtggctcatgcctgtaatcccagcactttgggaggtcaaggcaggaggatcacttgaggtcaggagttcaaaatcagcctggccaatgtagtgaaaccccatctctaataaaaatacaaaaaaattagccgggcatggtggtgtgcacctgtaatcccagctactcgggaggctgaggcaggagaatcacaagaacccgggaggcagaggttgcagtgagccgagatcgtgccattgcacaccagcccgggtgacagagcaaaactcttgtcttaaaaaataataataaaagaaaaagaaaattaggccttcaggagctcaaaatggctgttttaactgacactgttttgcagtcactcatgataactcagcctctgtggccaaaggctctgccacctcaaagacttccttgcaggatggcagaccaccgacctcacagaccacccacccaccgcctggcccagaccaggatgccttttgtcttcttcgctgcctctgaactggttccttaactctttctcctatctcttttttctcttgatgttaaatgtcactttgttggttgtggaatgtttaacctataacatttctatattaagtatactattatgtatggtttgcaatattaactgcttgtggagtggcttgagcctccgtgcctgtggctctgactaccaagtgaatgagaagcacaagggataattggctccttgggaactccatgtagctcatggcttttgtgattgaaataacatcagtaggccgggtgcggtggctcacgcctgtaatcccagcactttaggaggccaagacgggcggatcacctgaggtcaggagttcgagacaagcctggccaacatggtgaaaccccgtctctactaaaaattcaaaaattagctgagcatggtggagggtacctgtaatcccagctactcagaaggctgaggcaagagaatcgcttgaacctgggaggtggaggttgcagtgagcaaagatcacaccatcgcactccagcctgggggcaagagcgagactttgtctcaaaaaaaggaaaagaaaagaaaagaaataacatcagtaaacacttgacattgcggaaagacacgaacgtgtggacctggttatctctgaccttgcactgatcatgacatgtgcatagcaaaatgggcagaacagccaaaaaggggtggggggcggggggtaggacatgttggtcaaagggctccaagtttcagttagacaaggaggaataggtttccagatctattgcacagcatggaaactgtagttatcaataattaatgtatatttcaaaactgcaaaaagatcatatcttaaatgttcacattgcaaaaaatgataaggatgtgaggatatggatatgttgattagcccaatttaatcattccataatgtatacatatatcaagacatcatattgtaccccataaatatatacaattattattcattgattagaaaaaataacctggcaacatcaagtgatggcaagtggagtgattggaagtcttgtgtatgtctggtgagaatgcagaatgaaatggttgctttggaaaacattgtggcaatgtttaaataaaggtaaacaggccagccatggtggctctagcctgtagtcccagcactttgggaggctgaggcgggaggattgtttgaacccaggagttagaaaccagcctaggtcacaacgtgagactctgtctctatagaaaatgaaaagtaaataaaaaattaaaaaattagccgagtctggtctcatgcatctgtggtgccagctactcagaagctgaggtgggaggatcacttgagctgggaggtcaaggctgtagtgagctatgattgagccactgcactccagcctgggcagcagagccagaccctgtctccaaaaataaaataaagtaaaatgataaacatattcattttttaaaaaagaaaaaaatcaccggagggactatgtgaagaactgtccgcagagacagtttgggaacctgggacagaaatgggtgatggcacacacaggtaaagagaaattccctgggctgatcaactcatgaagagatttgttcattccacaaacacttgttcattcaacaaacacacttacctgtgcctggcgctgctctaagcgccaagggttggcggtggacaagagaggggagaatctctgcctcacctgtgcagtcgctgcagcacaatgaggagacaagcaacccatgcttcagacacagacagaaagcaagaaggaaaaacggagtgaggtgctaaggcagggccggtgagacaggctgaccagcatccagacagacaggatgagtcccggccatccaggagggattctgagaatcagctgctgcctgaggctttagaaggacactcctgaaggtgcccagccttcaggggctctccaccaaacaccctggtagctgcttaccttgaagactccaagccagctggtggagcagtgaaatcaaacagggtgatgttgtacaggtggaagatggagaagctggccctgaccaccacatcccctggacagtcaaagcgggggctcttccctggcaaccgccagcctattgggccagaaacagcagccccagagagagatcccacaagggcgggaagcagagagcacagcaacatgtctgtggtgtgctgacagccagcaacggcagcccccgtgtgggctgcttccaacagtgatggggggctttcatctgggagctcacccctcaatccaggacctgggggctggggacacagatggagctccaggcatccaggccctgggagaacagtggccactcagtcccagggccattaaaacttgtacttcctcctcctgtggtttctttgtctctgcccaggccaggggtaacagcccccaggcctcatctgcagacttcagagagggaggttgatgagtcctgactgtgtcctcagggactctgcaaacccaggagcagctgcacttagggtccccaggtcactggttttggagaggcccaaggagggtacaagaggcgaagactctcctgagccctcctgcctcagttggcagtgtttggagatagggacatccccagagcttcagtggccctgggttaacacctcctgcctgggggctcccagagggtcccaggcaagggtaaagcatgttcagcccccagagggctggcccaggctaagctggtgcgtttctgtggtcaggaagtccagttccaggcggagggtggagggtaggctgcaaagtgactccctaacatagtgcttacaaccccaggagatgcggctgtgaggcaggaaaatagagggaattggaggttaaataaagggcaaactgagtaaaagcagaagcaaggtgaagggacaggtaagcaaaaagcaaaatatgggcaggtgcagtggctcatgccataatcccagcatattgggaggcgggggcaggcagatcacccgaggtcaggagttcaagaccagcctggccaacatggtgaaacctcatctctactaaaaatacaaaaattagccaggcatagtagcacacgcctgtagtcccagctactcaggaggctgaggcaggaaaatgacttgaagctgggaggtggaggttgctgtgagccgagatcaccccactgcactctagcctgggcaacacagcaagactccatctcagaaaaaaaaaaaaaaaaaaaattccagaccttatcactttggagaaaataccacactaaaaagtgaactgaggaggctgggcgtggtggctaacgcctgtaatcccagcgctctgagaggccgaggcgggcggatcacgaggtcaagagatcgagaccatcctggccagcatggtgaaatcccatctctactaaaaatacaaaaattagctgggcgtggtggcacatgcctgtagtcccagctacttgggaggttgaggcaggagaattgcttgaacctgggaggcagaggttgcagtgagccaaggtcgtgccactgtactctagcctgggtgacagagcaagacttagtctccaaaacaaacaaacaaacaaacaaaacaacaacaacaacaacaaaaaacctcaccacgttcttgatttgtgtgtccctgatcactaactagtcagatgggacttttcttcacattggttagccccatgtatgtaagagggtagtatctttctaagcttggggtaggcttggtgagctttttttttccttttttatcttttttcttttcagagatgaggtctcactctgtcgcccaggctggcaaactcctgggatcaagcaatcctcccacctcagcctcccaagtagctgggactacaggcatgtgccaccatgccaggctaatgtttaaattttttgtagagatggggcccagttccatctggagttgatttttgagtgtaagggggtgacattcggtcttccttagaaaggttcaaagaggggtccttcaaactgggattctaggtcttctcccatagcttcaactcaaacagttctgcatttttttttagacatgaggtctcactctgtcacccaggctggagtgcagtggcaatgcatcatagctcactgcagccttgaactcctgagctcaagtcatcctcctgactcagcctcccgaggagctgagactacagaaatagccaccatgcctggctgatttttctatttttttgtagagacggggtttcgccatgttgcccaggctggtctcaaactcccgggtttaagggatcctcccaccttggccccacaaaatgctgggattacaggtgtgagccattgcacctggccaaaataacatttttattgagatataattcacacagcataaaattcacccttcttttttttttttttttttttttgaaatggagtctcactctgtcgcccagtctggagtgcaatggcacaatctccacccactcacccactgcaacctctgcctcccaggttcaagcaatttgcttgcctcagcctccagagtagctgggattacaggtacccaccaccatgctcagctaattttttaaattttttggtaaagacggggtttcactatgttggccaggctggtcttgaactcctgacctcaagtgatctgcccacctcagcctcccaaagtgcttggattacagacgtgagtgactgtacccagccgaaccttttacagttcagtagtttttggtacattctccagattgtgcgatcatcactggaatctaattccagcatcttttcatcgcccccaaaagaattccccttgccccttcttctagcccctggcacccataacagttctgcttttagctgatttacttttaattgggatttcgagtaagatttaatttgggacaaagatttctactgcttaaaaaaattttggtccgggtacggtggctcatgcctgtaatcccagcactttaggaggccgaggcaggtggatcacctgaggtcaggagttcaagaccagcctggccaacatggtaaaaccccgtctctactaaaaatacaaaaaaattagctgaatgtggtggtgggcacctgtaatctcagctactctggaggcttaggcaggagaatcacttgaacccgagaggtggaggttgcagtgagccaagatcacgcctttgcactccagcctgggcaacaagagcaagactctttttaaaaaaaacaaaacaaacaaacaaaaaaaaactgaaacctctgctagacaccaggctgcctcccaatggatctagagttaccaggtggcctatgatggtgtctagatccagactctagagacagactaagtcagtgttctctcaagggagatttcccaaatgggtggcagttataaatgcacacatgagccttcactgccccaaagggccacgccaatttcagctaccaagaaaatgaaccatgtcattacaagtgcctaattttcaagaaggagaataataagcccttagcaccctaatttggttttcccatagtggtttctgcacaaagtggcattcacacacaacattccagggaccagccgccagcagcaaagatgcggagacacggctctgattatccagctgaggcagcccctcccctccctgccactcctgggactcttaatctccaggcctcgttttattttattctaggtatttatatttccatgaagcatctgctttgtttactggtgtttgccccatgaacatgggcttccaagggactaaagccctatcagtccctctcactgatgtgctcccaccccagtgtccagaacagtgcctggtacacataggccctcaataaacagctgtccagcagatgctggaccccctggaggtgggtcctcctctcttttcttagctcacactctcctgcttcttcttcagcaatgagcagcttcagctatcctgagctcagtcccagagctgaggaccctccttgcatcatgatctcacccccacctgatttcagatacaaaacgagtatctgtggaaccctactattctggcacatggttacattgtagacattaatattaaaacttatttatatgaaatgttcttatgtaaggtttcgttaaagtatatgaaatataggacacattgatactaattccttgtttttctttttctttctttctttttttttttttttttttttttttgagacagagtctcactctgttgcccaggcaaggctggagtgcgttggcaggtctcggctcactgcaacctcggcttccccagttccagcgattctcctacctcagcctcccgagtagctgggattacaggcacgcaccaccatgcctggctaatttttgtatttttagtagagacggggtttcaccatgttggccaggctggtctgaaacacccgacctcaggtgatccgcctgcctcggcctcccgagttctgggattacaggcgtgagctatcgcgcccggcctccttgtttttcttgagtttacatataactgaggtttcttttttctttcttttttttgggggtggggggacggagtctcgctctgtcacccacgctggaaaactggagtgcaatggagcaatctcggctcactgcaacctccgcctccccggttccagtgattctcctgtctcagcctcctgagaaactgggattacaggcatgcgccaccacgcccaggtaatttttgtatttttagtagagacgggggtttcaccatattggtcaggctggtctcgaactcatgacctcgtgatccgcctgccttggcctcccaaagtgctgggattacaggcgtgtcaccgcgcccggccgacgtcctgtatttttatttgctaagagtggcgatcctagtctgggacatacttgtactaaacatatttatattaaaaacaatgttttaacatactactcttggacactgtataaaacggttgcgtgtctggaatgccgtcgttttgccccgcggccccatcgtacatgcgcatccccgcagccgccaccgtctccactttccgcagcagcgtccctgacgctgcgcgacccgttgccaaggcgactggaaccgcggcccgaggtaactggagggcacggcgggggcggggcgctcatcccaggcggcttctgattggcctcggccgcctcgtgcgtcacagccccgcccctgcccgggagtcccgcagcggtgacttgtcaccgacgcccggcgtgatccagcggaccaatggcggccgcccgcggcgcgcagggtgcggggatggggtccgcccgcggcgttgggcgcgctcgccagcccaggggtcgccatgaccgagtggcccaggcccgagcgaagcccgcgcgcggtgagtccgccgcggcccatccgtccctccgcccgccagagcgtccatcgggacgcccacccgggagggtctcggcgccgcgtcggcgggagctggcccgggatcgcggtccaggggcgcgcgtcgggggaggcgggcccgggcccgggagggggcgggccgggccggggttccagagcccatcgggagtcctgaggtcgccgtaggggagggaaggggaaggctagaggccacgcggggcggggactgggggggctggggccgccccttccgcagggaccccgacccctgttggcatccgcctgtccgtttgaggccgaagcccctctacgtacccccattgcccgcccaaacaccgctcggccgcgtccaagttctcccttccacacctgatcagcatcccgggacctatctccctcctgaacagccgcccccggacccatctccctccctacccggccccttgggcccatcccccactggaacagcagcccccgacccgtctctctccctacaagctccccctccccgccccaggcccatctccctcctgaacagccgcccccgacccatcccccacccaatcaccccaccatcctccccccaaccagccgtccacagccgtcgtcgctgcccctcccctgtattcccagtgcgctgcccttgcacacttccccagctcgtttattatggaactcctccgtgtggcatcctaagctcccaacgccctccccactgtaagcccccttctcaaagccagaaccattcactgactggcgcagtgaacacgtcttctatgtcactaagcatccggcatcagcggcaaagcccttctgcccatccccgcaatagaatttggggctcgggctgcagatctcagtgcccatgccaggtgaacctggcccttccacaggcactgagccctccaagtgacactctctcacacacacacatccccaacattaatcagagacccctaccaaagtagacttctaggaccccagggccaccacagcattgcccatgggggggcccagatcctcctcaccagccatgtagacctcagtccccttcacatcatcccaggccctcttcatcttccagaaacagccacccatcagtccaggactctcatcagctcaggtacccccacattggcctaggtgttccacatcagcccccatatagaccccagacacacccatggacctctggtgccttctgctaagacctcctctttaccctcatccctgataaacttagcatctcctcccacagacctcagcccaggaccctggaggatgctgaggggctacagcccccctccctagagtctccagggtgagctgccatgagcacctgagagagtataaggtctgaggccccagggcaaagggatttcttgaacctgtggagcttcaaaataggcccttttttcttattcaaaactacatatataaaagtgtgaatacaacataagagagcatttttgcctgtggccttggcagggaagaccaagctggtagtttcccaatcagggtgcaggtggccgggtacgctgactcgaagatggctggctgggcacagtccccgtgagttgcctttctgccaccctgcacctctcctttctcctggattgtaaaaccagatgcacgagaactgcagagtgtatgaaaaatgcagcagaggatgaagagggaaaaatcccatggaatccctccttttcacttgtcataagcatttcccatatggtcaaaaatccttcctaaagatgtcttgttttgttttgtttttccatgttgatgaaggtcacatgggagcccgacaccatttggaggagattcagagaagtatgaacagcacaaagcacttggccgccccccatgggcgtcttcccaggactccctttctatgacactcacgcatcatcctgcatcccacgttccctgtgcctcatgtcatctgtacatcatgtgtctactccccgtggtcatgtcatagtgttgtgtactgggcacggttgaatactcccatcacatgatgggggaggtagttgatcccaccacgttcaactgttgggcacttttgtagtgaatcttggtgcctgaatctcgcatcttgcacgcagtctaccaagtgttcttgatatataaatggccacagtgctttccagaaaggtcgtgccaatttatattctcaccagcggatcagtccagagtacaattgttaaagacaaacaaacgaaacctccctgcttatttttatttttacaacttttaatgttttcttcagttatatgttcaccatagtcggcttggaaaatgtacaaaaggtaacttcttttttttcttttcttttttttttttttttttgagacagagtcttactctgtcgctcaggctggagtgcagtggcacagtctcagctcactgcaatctccgcctcctgggttcaagcatttctcctgtctcagcctcccgagtagctgggattacaggtgcgtgccaccacgcccaactcatttttggttatttattttttttgggatggaatctcacgctgtcactcaggctggagtacagtggtgcgatcttggcttactgcaacctctgtttcctgggttggagcaattctcctgcctcagcctcccacgtagctgggattagaggtgtgcaccaccacgccggctaatttttgtatttttagtagacggggtttcgccatgtcggtcaggctggtcttgaactgctgacttcaggtgatccacccacccgggcctcccaaagtgctgggattacaggtgtgagccacggcacccggccacaaaaggttattttaaaattactcttcccactttccctctcttttcagagtctccagtctcccttgccctcttcctggtctccacccccagcttggacctggtaggaaagtcaggaagacagcaaagataacaccatgggtagacctgctgctggtggtggtgtcatccattattatgtagcccacctggctgcttccatttaaatggaatttaaatttaaaattcagttcctatttcaggtgctcctagccacacgtaggtggttgcatgggtagagaatctttacatccctgtaggaacttcactgggcagtgctggccacaccacggggcaggcattcttgttcccgcagctcgtcagtcaatgtgtgttgaatgactaaatgagagggagatagacactaagtaaggggaaaagttgtgttcagaaagtcatggaggttatgaagacagtgccataaggatgatggccaggacatctgcgaggggaggagctggggtgggaaggggaggggctggggtgggatggcaggtgcaaaggtcctggggcagccagtggcttgaactcagtgcaaagtagcctgtgagaggcatgtggaagattaggtcagaaggtgggaagaggtcaggttggttccttggggtgctggaggtcagaacaaggaagtaaggagccgaggggcatcctgagtacagagggccaccatctgatgtgacccctctgtccctgcccctctctgcaggcccctgattgctgattctgtccgcctgccacaccggctctgtccggagccactgggactcgggatccagtccacacacacccctcagaggggcactgtggccagagaaatgcttccacggcccaaagcccctgcctcccccagacgcccccagaccccaaccccgagtgagcaggacgcagaccctgggccagcaagccccagggacaccgaagcccagcgtctgcgcttccggcagttccagtaccacgtggcgagcgggccgcacctcgcgctgggccagctctggacgctgtgccgccagtggctgaggcccgaggcgcgctccaaggagcagatgctggagctgctggtgctggagcagttcctgggcgcgctgcccagcaagatgcggacctgggtgcagtcacagggcccccgaagctgcagggaggccgccagcctggtggaggacctcacacagatgtgccagcaggaaggtgagaggcgcaggcttcctgccccgggccgggccagggggcctgacgtctccgaggaccgaactgccctccttcccgcccacatcgctcccacccctgcccggcccctcccgaccagcaaacctctcctgccccgcggctgtgtttttaattatttttacatataaatgtgctgcacgcctcatctgcctcgaatttctcactcagtcggtgattaaagatccctccatttcccatgcgtccatctgtcctgtggctttgtgtctgctgctcctcacggctgctctctgggaaggacgctgcctcgccacttcctcccagccacctgcagcgcctcctgcaacactcaggaatcctagagatccttaagccttcacagggcgcaggccccatcgctggctgatggtggggagagacgcttaggtctgcatcccgactctgggagctgggaaatttggggttgaaactgggctccctccctgtctcctctctcagctcccctctcccctgacagggctttgtccttctgcatctttgcccctgtgaccccacgtcgagattccatccacccagggcccagtcccatgagtggggctctttctttcctagtgacaaaagtgcagggattggacactgggaggccaaaagaggcagccacggatggtgagagcagtcgtggcactgtggcctcgggagggcttccccagcagggccccagcaaggagggtgccaggcagccacgctgcaggagcaaaggctgggagtgagaagggttgcatcagagctcacagaaaagaggggtggagcaagggagaggaacaggccctccctttgcaccctcccactacagcatttccgtagaccaacagtgataagcagtttgcagaacacagggtccagggtccccttactgccccagggcagccggtgccacacttaggaaagctgtgacagctgagctttccagaggctcaagggtagccctgtaagctgcaaggcagaagccagatgaattggccctttgaactctctgatcctggggtagagggcccaagagcactggcttctggcgctctgtggacctcacagccatcccagcccagagccacccttgctagttttaatgttccatggtcactctcaaaattcaacgtttttgagcaaagggctctctatctgtcttccatagcggtggtctgctttctacattccatattttgagcctatgaaacagtagagcaagtataatgaacagccctgcaccggccacccacccttatcaaagcccaacctaggaaatgctttgtaatctcagcactttgggaggccaaggcaggcggatcacaaggcaggagttcgagactagcctggccaacatggtgaaactccgtctctactaaaaatacaaaaattagccgggcgtggtggcgcgtgcctatattatatcccagctactcaggaagctgaggcaggagaatcgcttgaacccaggaggcggagcttgcagtgagccaagatcacgccactgcactgcagcctgggcgacagagcgagactccgtctcaaaaaaaaaaaaaaaaaaaaaaggaacaaccagtggaatcagctgaacccccatgcacgtctcctagtcctgttgtcccccgctctgcctgacaccccagaggtggccgtgatcttgaatttttctttttttaattaaaaaataaataggggggggtcttgctgtgttgcccaggctgctctcaaactcttgggctcaagcagtcctcctgcctcagcctcccaaagtgctgggattactggtgtgagccaccacgcctggcctggttcccacgtcttgacccttctgtcaatggtgtcctgaaccctgcttcagcagtcgtcctctgtgcactctgtgcacacagccccggggggcttggggagcagagggctcacagtgctcgggcctccctagttagtcagtgctgcagtgtgtgtcctcgtgggcttctggaggcgcacaggggtgtggagtatgagtgaagagggtacttgtcttcagcggccctcggtgtcaccacaggttcctgcccagcagccacatggagggacagaatgacagccctgcagccactcttgcctgcgcctcaggggtgctgcagggatgttcggggaaagtctgccctccccagaaggcctggagaattgggggctctgggaagaacaggcccctctcacgatccctttctcccgcacagttctggtatctctggactcggtcgaaccccaggactggagtttcggtgaggaggaagatgggaagagtccaaggtcccagaaagaaccatcgcaggtgagcccggggcccccagctccgtgctcctgcaccccagggcatgcgtgccgcttctgggacggcctcaaggatgccccatccaaggactgtgtgaggttgtccccagcgctcccaggaagcccggcctccaaactccccgcctgccccacagattccccaagcttcctggggctcagtgctgggcgagggcagtcagtgcagctgtgtgtttgctgtgtgcctctgggcctcaccccagcccctcctgtcctttcccagcctcgcagttaagacccatcctcctgtgtcacccgcaccagatgctgcgtgtgttgagaaagtcctgctgccccgatcatcttccctcagtgaacccaggattctgggcgggcccagaaggaaatgctgagggctcccctgcagctagacctgctgttgcgcaggcctcaaggcgacgggaggggcccggctcggttgggagccaagcggatctctgtgtggctggagagattaaaatcaggggtggggacacgcagacacatgagagaaatccaggggtaatgggtaaatcacaaaagaacaaaagtaagaactgctaagtgagtagcatgtgttcgtatgatcagggctactgagtttgaccactttctgcctctggatcttggtattggagccgccaagggaaacacagcacggtcgaacaatgaatggagcaaggttttgctcacagaccagagaccgggccagagcaccatctgcccatgtggctgtcaggccggggccagcaggtccctcctagaggggtcctgacctaacagtggggctgtctaggtgccacgtgaagcacacgcctgagcagaacaaaggggcacacattgggaaacagagacctccacacgaggcactacacccagcacaaactggggggaccccttatctcttggtaaggagatgttctaggcccaggacccactctcaggcagccaagtaacaggctgaaagactgcacatgtgtgtctcccactggcttagtccgttctgggtgctgtaacaaaatacggctgggtgtggtggctcatcccggtaatcccagcactttgagtgaggcctcacgggaggctgaggtgggaggaccacttggtcccaggagttcaagagcagcctgggcaacatggcaagaccccatgtcttaaaaaaaaatgagccaggtgtaggggtgtgcacctgtagtcttagcaactctggaggctgaggtaggaggatcacttgagcccaggagttcaaggctgtagtaagctatgatcatgtttctacactccagcctggatgacagagtgagaccctaactcaaaaaacatcaacagccgggcacagtggctcacgcatgtaatcccagcactttgggaggctgaggcaggcggatcacaagttcaggagttcaaggaagaaggaagtaacttgtggaatgctgagaaaggtaaaaacaccttcaaataaggaagaggaacaggctatgacctaatgcttgcttggaccagtataggcacaccagggcaaatatttaggctaaattgtgggagctaagaacataaagtacattgattttttttattatggctagcagatatataagaatgttagcacaggtctttgaataaattttgcttctaagagaagttactatttattcctaattagatggggaggaaagtctttgaagaggaacttctactttacttttttttttttttaatggagtcttgctctgtagcccaggctggagtgcagtggcgcgatctcggctcactgcaagctctgcctcccgggttcacgccattctcctgcctcagcctccggagtagctgggactacaggcgcccgccacctccccggctaattttttttgtatttttagtagagacggggtttcaccgtgttcaccaggatggtctcgatctcctgacctcgtgatccacccgcctcggcctcctgaagtgcgtgagccatcgcgcccggccctaaaatagatttaaagatcatcatgagagcccctctcctgcaccaaaacaaagtttcgtgggccgtggtttctgtttctgcatctaacggaggcatctaacctgggtagaccacagttgttggccacgggcttcctcagccgctgccggcagatgtgcttatctgactccctctcccatcccagacgccacgtggaaaccacagccgcgctcacaggccatcccctcaccacacggcaactccaaggactctctttttgcgggggtcgtaggtggggaaggctgctgaggtcctcccacccctctcccaccagggccgctgtggctgagaggatcctcgttggcgctggtttaggctgtggggctcagccacagcagggtgccccaacgtccctgagcgagctgcacttgtggagggagaggccttaggcctgaggcctggcgcccgcgtggagagacggcagctccgggatcggggcgctggtgagcgcggccccaggcattgccgctgccagggtgctaacactgcctgaggcacctctgcttttgaagtcgccggggattagcgggagcgtaggtgagggacaggtggagctgctctgcgcggggcagcccggctcgccaggaggcgctgtggagtgggcacgactggcgatcgctgagcgcatacaaccgcctaccatcggaagccttttgagaaatgcttccttaggcggtttcgtcaccgtgcatacatcgcagagggcactcacacacctacacgcacagcccatggctcctaggctacagacctgcacagcacggggctgcactgaatactgtgggcaacggtaacacaatgttgtttgtggatttaaacatagaaaaggtacagtaaaaatacaaaatagaagataaaaaacagtacacttgtataaagcacttgccaggaagggagcttgtgagactggaagttgctctgggtgagtctgagtggtgagtgaatgtgaaggcctgggaggttattgtgctgtggacttcataaacatggtgcacttaggctactaaattggcaactatatttccttcttcaatataatttatcttactgtaagtttttgctttacattttttttttctttcttagactgactctcactctgtcacccaggctggagtgcagtggcacgatcatggctcaccgcaacctcaaccttctgggctcatgcgatcttcctacctgagtcttctgagtagctgggaacacaggcacacattaccgcaccggctaatttttatatgttttaaaatttttttagtttttgtgtagatggggtttcactatgttgcccaggctggtctcaaactcctaggctcaagcgatcctccctcctcagccacccaaagtgctggaattacaggcgtgagccactgtgcctggcgtaaaaaactttctgactcttggggccgggcgcggtggctcacgcctgtaatcccagcactttgggaggccgcggcgggcggatcactagaggtcaggccttcgagaccagcgtggccaacatggtggaacctcgtctctactaaaaatacaaaaaaatagctgggcgtggtggtgtgcacctgtaagtccagctactccggaagctgaggcaggagaatcgcttggatccaggaggcggaggctgcagtgagccgagatcacgccattgcactccagcccgagcaacaggagcgaaactccgtctcaaaacaaaacaaaacaaaaaacaacctgtgtcattttaaaataaataaatgatacatcattatcccacagaaaggttatgctctgggggcagcagaaataaaagctttgttttaaagaagcggaagaaggattaaacctttttaaaaaccaaaaacatcgaagctgggcgcctcctgtccgaggccaaccgctgccgtcaaccgtccgcacggacggcgcctgaggagccaccgagacggcgaagagccgcggccgccgcggagaaggaggaggagccagcgcaggaggcccgagcggccgccacgcccggacacacggcgtccatcttaatgaggagctgccgcggctgggcgcccgccagcctcccgccgccgcctcgggtcaccgccccgcggggtagtccgggggatcctgctcatctcagcttgccagcaccctggggttgaggagctgcccgaaagtttcatttggctgctgcactcccacccaccctgcctacccgtgcttcagaggcgatcacctcagctgttggactctgaggcccgagtgccttcgcaccgtgtcgagagcgccatggacctccacctctgtgggttttgtggtcctggggcctcggtgccttcctgcccgcggctggcactcttcgcgccctgttggtgatgactcggtagtagagaagtccctcaagtccttgaaggacaagaacaagaagctggaggaaggcggccctgtgtacagcgcccccgcagagatggtggtgaagtcccgggggcagagagggtgctgggcgagctgaggcactactaccatggcttccgcctgctacggatccacaccaagatcgcagcacgcatgctctggcgcatcctcaactgccacaccctgacccgccaggcgcgcaggcagttgctccggttctgtgccgacctcttccgcctggtgccgttcctcctgttcgtggtggtgccgttcgtggagtttctgctgcctgttgctgtgaaactcttccccaacatgttgccatccacatccgagactcagtccatcaaggagaagaggctgaaggagcttcaggtcaagctggagctagccgagttcctccaggacaccatccaggagatggccttgaagaacgaggcagccaagggcagtgccaccaaagacttctctgtgtttttccagaagatccgggagacgggggagaggcccagcaatgaggaaatcatgggtttttccaaattatttgaggatgagctgacccttgacaacctgacacggccgcagctggtggccctgtgcaagctgctggagctacagcttcctgcgcttccagctcacgatgcggctgcgctccataaaggcagaggacaagctgtttgctgaggaaggggtggacagcctgaacgtcaaggagctgcaggcggcatgtcgggcacgaggcatgcgggccctgggcgtcagggaaaaccacctgaggggccagctgaagcagtggctggacctgcacctgcatcaggagatccccacatcgctgctcatcctgtcccggaccatgtagctcccggacaccctcttgccagccgaccagctcaagtccacactgcagactctcccagagattgtggcaaaggaagcacaggtgaaagtggccgaggtggagggcaagcaggtggacaaggccaagctagaggccacactgcaggagaaggcgaccatgcagtaggagcaccgcgagaaggagctgcagaagcattcggaggtggcgaaggatgttgaacccgaatgtgtggaaggcgctccccaaaggccaggggcccagccccagccagaagtgcctgacactgtcctgcagtcagagaccatgaaggacactgcccccgtgctagagggcttgaaggaggaagagatgactaaggaggagatcagcatcctcagcaatgcctgctctaagctgcaggaacagaagaagtcactcaccaggaagaaggaggagctggagctgctgaaggaggacatgcaggactacagcgaggacttgcaggagctcaagaaggaactttcaaagactggtgaagaaaaatacatggaaggatctaaagccagcaagagattgacaaaaagggtgcagcagataatcgggcagatcaacggcttgatctcgcagctggagatggaccagtgggccagcaagctggccccggccaagggcgtgcccatgggggagaacgtcatcagtgttgccgagctcatcaacgccatgaagcaagtcaagcacattcccaaaagcaagctcaccagcctggccgcagcactgaatgaaaataaggatggcaaggtcaacgtcgaccacctcatcaaggtgattgagctggtggacaaagaagatgttcacgtctccaccagtcaggtggccgagattgtagcaacactggaaaaagaggagaaagggtggagaaggagaaggtggagaaggaggttgcagaggtgaagagctagagccactggcgtgggcacctgtcctcctgctgcactgccaccctggtgagggctgtgagagcgatttgcggtgattcttagtggctcatctaatactttggctggaataaatcagagacttccataatcaagtaaactgtaattttcatcattccacggagcttcaatctgtctggagtcccagaatccctccacagaatcctgtctggatccacactgtggtgtggctgccacggcctcctggctccagaggcggctgggccaaggcaggaaggtgcccccctgtgtgtggcctcacgtctcagtgtctgactgtgctgccctgtgcccagggaggagaatgaggaccacatggactctgcccacacggagctggctgctacgcccaccctcagaggcgtcaggagacacagcctggccccctcagggctgaagatgcctccattcacctgtggaccttgctttctagatttcagcatcaatagacctgtcttcctgcatgcttttagttggatctgggtcactgtggagacagaggtatctgccatctctgtggcctctggagagtgacgtctccctgctggcagggccggttctcacctgcagttttccttgtgtatcggagctctttcttaactttctattttcccccaattctttaagcagtcgattggcacagagttttcccacgctggtcggcctgccccaagagccatctctgacccaagccacgcaactctgacgtagccctagccatgggactcccttgggtggtgcttgggctgcgcgccacgggggctgcagtggatttactgtgtcagggatgagcctggctcgggttggtggggctctgaagcacatttggggttctttgtagcttctaatgtgaggtttgagtccagtgcacccacagcagcatacccttctcaccccttgtggtgttgcaggctcaggcccctggggtcctttaacaagcaggctggtcaccgaggcacgaagacgaggcacagggcatcccctggggcttcaagggcaacacccgcagtgcttagggtttaccctgtgccctctgggtggggtggcctccctgcactcggcagcatggtcgggctggcgagggcgtgggcaggcagtgtcctgtggccacctccaccctcctgcccagccggctgtgtcacactcatatttttaaggtcaggttggttcctggtaaaaatgtccctccgggggcctccaagcataggatttggaagacataggaatggcacaggcagccaggaaagcagctgcgctcagacgatgccttctccattacttgaagcttctttttgttcagccattaaagaaacttgacaaaataggaacaggagatatttctcaattgtaaacctttgtgcagggacagttggcttccaaagcctttcagatttcaattatttgagaaagaagtttgttttagatccttaatatttatgaattctcaaaaaaaatcaatgtatagacattttatagctttaaccctgcaagtgtttcaagctgtgtttcttaattagtatactaactgccctggggcatgtaggtaagtgtaaatgatgtggtttgagccaagttttcatctgtaatcccactgcttgaggtggccaaggccggaggataagccaagcccaggagttggagaccaggctggacgatggagcgagaccatgttactttctttttcttttttctgagatggagtcttgctctgttgcccaggctggagtgccgtggcatgatctcggctcactgcaacctccacctcctgggttcaaatgattctcctgccccacagacaaacgccactatgcctggctaatttttgtacttttagtagagatggggtttcattatgttggccaggctggtctcgaattcctgacctcaagtgatctacctgccttggcctcccaaagtgccaggatgatggcgtgagccaccgaggccggccctttttacctttttttgagacggggtctcactctgtcacccagactggagtgcagtagcacagttatagctcactgcagccttgaccaccgaggctcaagtgatcctcccatctcagctagaattacaggcttgagccacagtgcctggtaattttctaattttgtagagttgggacttagctatgttgcctacactggtcttgaactcctgttctcaagcaattctccagcctcagccttagcctcccaaagtggtgggattctaggtgtgagccactgtgcctggcctttaaaattttcaatctccccaaagcctccaaaatattctttagttagttcttcagaagtagctgggctcaatccacccacgaaaacctttcggggggttctttcccttttcaagctttggctctttgcagcaggggtggggggtgatcctatcaatttgccatccagctcctgttctttccgttccaaggccttaagagcactagcagcgttttccaaaagcacagatacaaatccccttgatcttccagtaactgttttaactgtgcaatctgcaacttccctaagtcaagacacatcgtcagatctttttgcttgtaacactgtaccatcatccggcagatcttggatccctctgcgatttcctctgtattggttgtggtactcattcaggtctttgctggtggagaagttgtaggcggggggtgctggtgcacattcagggtcaggcagcagcttatgctacggagttggatttcaaatggtggtggaagagagtcattataattttacgagatcactgtggtgtgtgtggtccattgttgactgaaacaccattaccccatggggaggggctgcctgaagcctgtaagggtagctgcccgaagccctttgagggtagcactctaaggtccctgagatcccatgggcgtatctccctgaggccctggcgggaatgactgttggaacctcagtggtaagtgatgccagtgtcctctgtggaacacactgctggggtccctggtggttcccaccgcgtagctgatactcgtggcccctgcttttcttctttgtgcatagcgatctcctggcatctcaggtatgcattatctcaccggtgagctttttcttgtgggcattctcgggttttttcactttactccactgtgttgctgcagatcttcaatgggtccttgagcgttctgggctattctggcttgtgaatatctgtctgtagttgatttgtgtgtgggtagtgggagggggaaatgaaggttggtatctcctactccaccatcttggtgatgtcgctccactctttccttttttttttttccaaaataacccagcaccattgccccaactaaaaccattaagataattcctggccggacacggtggttcatgcctgtaatcccagcactttgggaggccgaggtgggtggatcactagaggtcaggagttcaggaccaggctggccagcatggtgaagcctcgtctctaccaaaaaatacaaaaattagctgggtgtggtggcacgtgcctatagtcccagctactcgggaggctgaggcataagaatcgcttgaacccagcgggtggaggttgcagtaagccaagattgcgccactgcactccagcctgggcgaaagagtgagaccctgtctctaaataaataaataaaatagagctattaagataattcctcaacaacagtaagttgccaggcattcatatttcctcctttattcttgtttcattttgttttgtttgagacggcgtctcgctctgtcgccaggctgcagtgcagtggtgcaatctcagctcactgcaacctccgcctcctgggttcaaacgattctcctgcctcagcctcccgagtagctgggactacaggtgcacgccaccacactcagctaatttttgtatttttagtagagatggggtttcaccatgttggcctagatggtctcgatatcctgacctcttcatcctcccgcttctgcctcccaaagtgctgggattacaggcgtgagccaccacgcctggccccttattcttgttttctttttcttggttgcttggtttgcatcaggactctcccagggtgtgacatgcatctccctcccgcctccaatctccccacctgtcatccctgaaacaataaacctgggtccacctctggaaggataagaacccagatctgtggccagtggctcaccggggctatggggatgtgtttgcatttgaaggtacagatagggccccgggaatgtcttggtttctgtgcctgacccaagtgtgtcgatagctcctctgatgccccctgagagtcaggggaactaagcatgcccctctctccacacatacatgccacccactcttctctccacgcagcccctctgctgcccttgattagtcacagacgccaaggtgggtgaagtagggaagagcctgactgtccacaatggcccccagtagccaggtaccaggaagaggcgtaaaagggagtcccgcctttactcctatagatggtggctcctctggttacgatttcagaattcaacatgttttacaatcaaaactagcatttgataagaaataaaaatcaataacccagccaaacacaccatccacatactcccaacgtgagagcaggaagaatcttgtgccttaactcccttcctgccatcagctccctccctccctccctccctcctccgtctctagcccagcaatccctctactccagttttgcccagctattgggaatcttggacagcttccttaggcccctgtgcatccaggtagggttggggcagcagaaagcgaagacccactcaagacagaccttgtcagtgcgtgcttgactcctggtcttttctgatgctttgtttgactcaacatacctcctccaacaacctgatttgcattgataagtgtcactgtgttttcctttgacacgactccgttgcagtttgccgagcccttgatggtaccaggctctgggcacgtagcacccacatcctcactggaaacccagagagctaaagctcctcatccagggccacacaacaagcagggctggagcctggacaccaagccaagcccctctgtttcgaattcttgctcttcaaccacagctcagtctcctcccaggaagtggtgatccccgctttgggcgggacacggttaggtgcatcagaggtcataggtcgcaggtgggatgtgaagtctgtgaagtcgcccacttcctctgggcttgtgggcaaggacagtgcagccttgggggacgggagttaggagccccagcttgtaacagtgacccgagctgtggcacaggtcccctggctccatctaatgctctgttgtcactgtcctgaaatgatcaacgatctttgaacaaggggatttgcatttccattttgtacaggggcccctcgaattctgtctcaggtcctgttaagagctctttaggagtggttatttattttttgtataagcagagtcttgctgtgttgcccaggctggtcccaaactcctggcctcaagcaatcctccagcatcagcatcccaaagcacgggaacaacaggcgcgacaccgcgcactgccctgggacagagcctttggggatgacgcccgttccttggttgttcggtggtggtggggaggatggctcctgaggggcagctgccgaacagtcctgtgcttgccattctaggcgtctgagctgattctggatgcagtggcagcagccccagcactccccgaggaaagtgagtggctggagactacccagctccagcagagtctgcacaccagggcggaggccgaagcgccccgcgcccctggcttgctgggtgagtctggctcctgtgtggattaagggttggaaatggagtttgggacttcaacccaaagccacagactttgttaatgggttgagttgggtgcttcggtggtgaactccacacttcccccagaaagcatgcacacctcctgtgaggactgagatctggggcccctagaaccaccatgtacatcgttcaccctacgagaagggcctcagcctccgcacctgaacggcagccaaggcagacagtctgagagtgttggagcacggggttacccagagggccagccaggtaggaacaagggccagtgctgtgggatctgctcccaaaacatgtgcctttttttttttttttcgagacagagtcttgctctgttgcccaggctggagtgcagtggtgtgatcttggctcattgcaacctccgcctcctgggttcaagcgattctcctgcctcaccctcctgagtagctgggattacaggcgcacaccaccacgcccagctaatttttgtattttagtagagacggggtttcaccatgttggtcaggctggtgtctaactcctcacctcatgatccaccttcctcggcctcccaaagtgctgggattacaggcatgagccactgcaccggccacatgtgcccttgtatcttaaaggacagaacggaggacacaggggccgtattgagcagaggaagggcctggacttggctcagtcactggggtcctccgtgcccctggggagcacagggagatgccaaggccatccactcactacaggtgacccatctccctcgccctccacagggtcccgggcccgcttgcctctgaagccgagtatctgggacgagcctgaggaccttctcgcagggccctcctcagacctgcgggcagaagggactgtgatctcgagccccaagggtccaagtgctcagagaatcagtccccgaaggagaaacaggaacactgaccagagcggccgccaccagccatccctcaagcacaccaaaggtggtacccaagaggctgttgcaggcatctcggtagtgccgcgtgggccccgaggtgggcggcccttccagtgtgccgactgtgggatggtcttcacctgggtcacccacttcatcgagcaccagaagacccatcgcgaggaagggccctttccgtgccccgagtgtggcaaggtcttcctgcacaactccgtcctcactgagcatggcaagatccacctgctggagccaccgaggaagaaagccccccggagcaagggcccccgggagtccgtcccacccagggatggagcccagggcccagtggcccctcgcagccccaaaagacccttccagtgtagcgtctgcgggaaggccttcccctggatggtccacctcattgaccaccagaagctccacacggcccacggccacatgtgaatggccagcctcgggcctcggccacccggccctgagtccctggggggagctgatgggccccagaagatgggggacatcccccagccccaccaacccctggccaccttgggactcctcttgaaggacacaagctgtttctcggaagaccctggacacctgctccgaagccaagcacgggatggggcttcccagggtctcagctgagaagcagcagttccacagcacagcctggtcagtcctgcgcactatagttttgcaagtggcttgaagaggagtttcattcgcgtcccatctttcagaagccttgtccaggtctccctgttagcacctgactcagcggcagcttctgccgctgggttttcatttcactgtggatatccctgaggccatgagggtgggagccggcctgggcagctccaactccagagaagggtacagctgaccccggctgccctcctgccagcttagcccccttggaacctaacagataaacagggttttgtttttttccttttttgggtaaagtacatgcaacataaaatttaccatttcagtcattaaaaatgaacagttcagtggcattaagcacattcacaacactgtgcaactaccagcactctctagctccaaagatgttttcgtcttgcccagaaagagagcccacagtcctcagcacgccttcgccattcctgcccgccctgacaaccagaatctgcttcctgtctctgaggatttcaggcgcagtctttaggcctgaccaaaactgacctgcctgtattttgtttgacttacagaaggattttttttttagatagatgccaacatttgtttaaaccataaaaatctggctttctggtctgccaggaaggatcagatggtctccaaagagtgggcccgcctctcctgctaggctggagcagagtgtgggcaggcggtgacgtcacagcggggagccagcctcggactcggcttctcacccgtccccaactcattgttgtcggacactcgtcccctttcaagcaaaagccttaaaagtttttgcctttttctttttctcctcccgacttcacttggaaacacagtgttgggctgactgtgaatccgcacaggcagagacatttttccaagtcgccttctaaatcaaaagcctttggacttacccacgtcacatccgcctgctgctgcttctcaaccaagctgcccccactctcggcctctgtccccgatggccctctcgggctgtgcaggtcccacggacccaccgctgccttcacttcatcctcgctgccgcgcttgccttctcacgcttgccttctcggagcgccccctaaccgcgcctccggaccttgcttcccggctccctcaggcatccccagcttttccctgcagtccccactgggggctcctggctctatcctatgccttaattgctggtgggctccagctcccctcctggcaccttctctctcatcctgcaaaggaggagcttcttctacagagctcaggatggagggtggggtcttggccccgcagtcagcccattactctcggaagcccccctgagccttctctcaggcgcagattgatcgtctcagacaacgggatgtgtagagatagctctcccgagtgcccccacttgttgggagccaggggctcattccatgctgtttccatctcggtctccacctgctggaggcacaatcacagctcagtttgttggtgccagagttgcacaagaaagtgggtgccattgaacacgaggcatcagtcaggctccagcctacctgggctggccccagagacatccatctggtgtccctcagttctccaattgagtttgtccaaataactcatcttcccttgtgcaaaaacaaaaaacaacaacaaagaaaacaacgcaaactgcctcccctctggggttcccactcccctcagagggaccaccaccttccaaggccccacaaggatttttgattgccctgggaacccagctcccaatccctctcagttctcttttctcctctgcaccatcagccccaggctctctccccatttcttgaatgcctgcagctgcctctaagcaaactctgcctccagcccgttccctctgccccatccccatcctgcagccaacagggtccctctaaaatgcagacactgaaaagacaaagcccagcagggtagctctatagtgtcctttgtggccctgctgcctccacagcccccagcactgggatggtggaggctggtgtccttaactcactgtgtctccacctgactccacactgcctctcaccctggcctcctcctgtgcctagaacagtctccactgccatacttgaccacacccagcatacaacaggtcctacagagtgaagggatgagtgactcaatgagtgaggggaagtccctgtggagacaccgggacaccattgtgggctgcagtttccagccggggaagcctccctcgacctctgaggggaggtgggccaccccttgagggccactctcaatgcgctccaccttggctgacggaagcaaggacgtggcccaggatcctggagggccactcctgtgtgcgccaccttggctgacagaagcaaggacgtggcccagggtcctggagggccactcttgtgtgctccaccttggctgacggaagcaaggacgtggcccaggatcctggagggccactcttgtgtgctccaccttggctgacagaagcaaggacgtggcccagggtcctggagggccactctcacgtgctacaccttggctgacagaagcaaggacttggcccagggtgctggaccagttgtggcagctgctgcaactcacgaaagccaccacgtggtgttcttcacctaacttgcccagtcccaagcccctgcccgagctgcagtgagacagagcactagcccctctcttctctttgggttcaccccagctgtggaagccccagcacctcagcacgcctcccttgccctgtgccttcctctgccagcaccccccaaagactccaacacccccatcacgatgtgccccagtctcctgtcctccagcccttgtcacaggagctgtgagcccagccctgggcacttcacgctctggaagaccggagtctcagacgccacctttctccctggcagccagggtctcttgggtcagaggaggcctggacactgccaggttttgaagctgtcaaaaagattttttttttaaagggagaaatatgtccagggagctgtaactgttacagtatattttaaatgtatgtgttgaacagattaactttttgaacattaacatacagcatgacacagttctgctatccatgctgtgattgcaggattgcttggaagctgtactgatgtgcagcccacctgctcatggtggggggtcctgttccaggccacagagaggcaaccagcaatgctctgcttggagattcgtacaggaagccaagaaggagctgagaggggcccagccagtggttacaagagacagcaggaggttcagaccacagcaagggtggcactggagtagcctccagctcatcttatttgactggtagagtgttattaaagcctttgaaatccctaccagcttttaaaaatcaagagatttcacatagaaatcctgatctctgggttctttagagaaatccagacctgggacgctgggcttgccagtccgcacgaccccacttggctggagccaagcagcacttgcccctgtagaaagagcccgcccctgcaaaagcatgtacggtttagaaacctggctgagaaaaacagaggatcagaaggtctgagggaggaaacagaggggcaagtttgagggagctgggcagggccgcctggccaccatcagggctgagcaggctcagtgtggcaccactgacagcttctcaccaggactatcagaccgcttgggaaaaagacttcaccatgagttgtgtgttcataccttttgatccagtaaaaggaaacggttgggggtgggggtggggggcaagagtatacattttgtgaaagaaaaaatacacaaaaagatgttttgtggcatttgggtttgtgagttcgagaactgaaaaacggcattttatgtataatggaaagcctctttactgctgtagagtgaaaagcaggctggctttcagtgcgacggtcacaaatgtggggctttacagtacttggaatgtacaggacgcccttaaaagccaagaagcttgcctttgctttgtttacatcagtgcattatgattttgagccattatatctcttcataattgccactgttttagggcttatgaaatttaaagtcttaacttgtgtgttaaccagccaaatctttgcaagtgtctgtgtgtggtacgagaattcgtattgtgttctctgctgttttcagagttgtttcagtcaaagaaaaaaaaatgcccgtcttaaaacttttcctctgcttcaaatacagctcccaagcccaggctgattggaattaatctgtcctcccttaaaagggcaaaagcacaaggctcagccctggctttcccagctcctctggtctcgctgctccacggacgtgtgacgtacgctggtgaaacgaagcccgcttgaatgggggcttcactattgtgtgctgctgaacctaggcctagcgcctggcaggctttggtgaatgttcagaaaatgacaattcatttcgtgtcagcgagggcacaccagctttgaatattttgctgctgttcaaatgcacaattttgacaattacctagcaatgtccaaagtcgtcataattgttagtgtcttgcacgtgatgttccttataaccatgtaataaatacagtgtgaagtctccatggctgcctcagtgtggaaaatgcaaagactcccgtgtgtgcgatcttggtgaatgttttggttgaaagtatgtgttttgaaaaaatcattgctttgtttgcagcagtaaaactgacggtagagtttccaacacgaaagcccgtgtggtcgcgccgggagctcacggcgttccaagcggcacttatcccgcgttgatgcccaggcaccccgcgcgccctgtttcaccaggcccagtcactccagctccagcagcactgagagctcacgaacgccaagggcgagagcgaggtgggggagggcggccggaaatgcgcgcgcggctctctgggaaatggagttaggctcgcgccggcgcagtgtcggctgccggtgccgcggcctttgtctcgcagtcaggagggtgagctaggccggcgaggagggggaggggaggccaggccgggccgggccgggccgggtgcggggggtccggggatcttcctgaggccctggcggggcgagtttccagcagcgcgcgtctgtgtggagtccgttttgctgcccggggcctggggaaggccgtttcggggctggcgggggcaggctttgcggggcatccctagtctgagaggagggcggggcccaacgcccagctggacaggagctgctccgacggcccctgagggaacgcgcgccccgcccctggccccacctctgccccacaccgggcactgggccgccacctttgttgatggaagagagaaactgaggcatagtgcccagggccaggggaccgcaaccacccggcccttgtcactgtagcgttaaggctcagagtctgcgcagcagatatgtgtccgcacccgccaggccttcagcttccctcagacaggcgggaaaaccctaggctgcccttctccgagcggagggccgccccacacacagcaggcgcttaaacgggtacgcggggccctggacggctctccgcggagctccccaggctctggcgcagttccccggcttggggacctgagcaccgcctctgcctgccccagctgctcacctcccctttcccacagagcagggccagccgttcctgccagaagccagggcatgacccctggggtgcgcgtctccacagacccggtgagaatctcggcctccttgcgcgtgtcctccacctcgtgcccggcctcctcgcgcgcggccttctcacgcccggcctcctctttgcaccccgtccctactcgcgctcagcctcctccttgtgcccggcccctacttgcgtgcccggcccctactcgtgcccggcctctactcgcacaactggcctctactcgcgcacctggcctctactggtgcccggcctctactcgtgcccggcctctatttgcacatctagcctctactcgtgtccggcctctacctgcacacccggcctcctaaagtccgcgccaagctccccaaccacagcctgcctctgaaaggaccgcccacgccgcgctggaggtcagcgggcacgggtccctgtctgagtgggctttatgtttgtgcggccgtcattgcatacctgaggctgggtgatgtcagaaaattgtaggtgccccggctctgcagtctgaagttgaaggccttagcatgctctgcgctccaagatggcgcatcgagtgccgcttcctcagacgtcatggaggccaagggggcggaactcgcctttttatgatgacattaaccccacccataagccaccagaagaaaccagcctcctgtaggaatgtcagaaaacccgtacaaggggactggtgcgatggcttgtagctgtaatcccagctatgggggaggattgcttgagcccaggagttggaggctgcagtgagccatgatgtgccactgcactccagcctgaatgacagtggaaccctgtctctaaaaaattaaaaaacaaacccagatttggccgggcgcggtggctcgcacctgtaatcccagcactttgggaggccgaggtgggcggatcacgaggtcaggagatcgagaccatcctggcgaacacggtgaaaccccgtctctactaaaaatacaaaaaaaaattagccgggggggtggcgggcgcctgtagtcccagctactcgagaggctgaggcaggagaatggcgtgaacccaggaggcggagcttgcagtgagccaagatcatgccactgcactctagcctgggcgacaaagcgagactccgtctcgggggaaaaaaaaaaccacccagattcagtctttagacttctgctactagctttataactttgtttatcccctaggctgaagtgcagtgatgcaatcatggctcactgtgcttcaaacttacgtgctcaagtgatcctcccacctcagcctgttaagcagctgggaccacgggcatgcgacaccatgctgggctggtccactcctttattgctggctccctccatttcttatttcaagagacaaattattggaaacgggcatgatgccttagattctaagatcctccacctcatcagcagggcacccatccaggccccacagaaaaacctgacccaaaaccccagaccaaagggaactccatccgacccagcctggctggcatttaccagctaccccaccagcagccagtgccagggttggcttggctgaggacactcgtgtgatgtttcaggagcaagtgacgtttgaggacgtggtagtgggcttcagccaggaggagtgggggcagctgaagcctgcccagaggaccctgtaccgtgatgtaatgctggacaccttcaggcttctggtctctgtgggtaaggccacacccatgtcctatctgttgatctgtccctgacacggattctgattctaccaggttaaatatttataggactgagctttaaaagcaaatgcctggggctgtatgtcttgggctttaagaacctgactgttttaatgtaggaaatatcaattaagaccaatattagcaagtctcagactcaacctgaaatcaacagaagcagagaaacatgaggtgagggaaacatactgggtctgaagactacagaatcccagggtagaccagggtgttctgtagagctgttaggagcccctccttcttcaacacctccctctgcacttctgtcttagtctgttagggctgctaaaataccttagactgggtaattttaaacaatagatatttgttgctcatggttctggaggctgggaagcctaagatcaaggtgtcagcaaattcagtgtttggtgagggcttgctcctcactgatggcactttcttcctgtgtcctgacatgccataagggcaagggagttatctcaagcttcttttataagggcactgatcccattcatgagtggagccctcatgaattaatcacttccccaaggccccacctcaacactatcagattaggtattacattctaacatttgaaccttatttatttatttatttatttatttgtttttaaattttttatttttgagacagagtctcgctgtgtcacccgggctggagtgcagtggtgcgatctcggctcactgcaagctctgcctcccgggttcacaccattctcctgcctcatcttcctgagtagctgggactacaggtgcccaccaccacgcctggctaatttttttttttttttgtatatttagtagagacggggtttcaccgtgttagccaggatggtctcgatctcctgacctcgtgatgcacccaccttagcctcccaaagtgctgggattacaggcgtgagccactgcgtccggcctgaaccttttttatttttaagaaacagggtcttgttctcttgcccagggtggagtgctgtggcacagtcatacttactgcacacttaacctcctggctcaagtaaaccttccatttcagtcttccaagtagctgggactacaggtgcataccaccacacctagctaatttttaaaatttttgtagagacgggtccttgctgtgttgcccaggctgccctcaagcttctaggctaaagtgatcctcccacctcagcctcccaaagtgctggaattacaggcataagccactatgcatagcctgaattttagggggacaccaacattcagaccatagcaatctctttctggcttcatttccagagaggctcctctggaggtgacaagacaactgcctggggtgcctttcctgcaaccaagaccagcagaaaagacaggatctgtgtcccagggttgtcctggtttggctgccaggtcttcttcacagtgatcattgatgccagtgggcaggggaggaaccagagttctgattgtccaggcttgggtcacatgtccaccccagaaccagtggtagggtcagggactgagagtaggggaatgagtccctgaggaacatccagggctgtgggtatgacagctgaagtcactcaggggtccccagccatctgggacctggaagaccaaaggtggaatgggctgaggctcaggaagggtcctgggatacaaatgctcactctatgggtctctccctgagcaggacattggttaccgaagccgaatgtcatctccctgctggagcaagaggcagagctgtgggcggtggagtctagacttccccaaggcgtgtacccaggtgagatgggagcccttcggggcagagagaagcctgtccatgcttgcttcctggtttctccctctgcatctgctctctaattcttcagagcaaatttactactcagtcttagtgaagatttaccaagcacccattttgctgtgagtgacgacaccacgtcctcatctccactgaatttatattcttggtgagggagtgggggaaacaaacaataaatcggtaaaataataataataaaacaagttggatgattacagattgtgatgaatgccgagaaaatgaaaatgagcaatgaggtagactaggagggggatgagtagactttagcagagagatgagggatagcctctccaaggaggtgacatgtgacttgaagcctgagccatgaggcagtctgagtgaacagtagtatttcaggcagaggaaacagcaggtgcaaaggcctgaagtcatgcatcagtcagcttttgtgtaggaaaacactctgacctcagtggcttaaaccaaataattgtttataattcatgtgtctgtgggtcagtggatccaggctgggccctacgccatgtgcctgtagggtgattggtaggtagcagaggtatcccagcccactgacaggcaatttcccattggcatcaggtgggaagagtggcctgtcaccagagtccaggagggatggccagtgtgggaaagggtcacagtagggtccctccacatcaataacagcccttacccaatatattagcttcctattgctcctcctgcaaccagttacaaatgacccgtgaataacatgggtttgaactgtgtgggtccatttatacatggattttcttctgcctgagccacccctgagacagcaagaccaacccctcctcctactcctcagcctactcactgtgaagacaatgaggatgaagatctttatggtggtccacttccatttaatgcatagtaaatatattttctcttccttatgatttttttaaatagctttttctttagcttactttaagaacacattatataatacatatacaaaatatgtgttaattaagggctgggagcagtggctcacacctataatcccagcactttgagaggctatggcaggtggtatttgaggtcgggagttcaagaccagcctggccaacatggtgaaaccccgtctctacaaaaaaaaaatacaaaaaaaaaaaattagctggccatggtggcacgctcctgtagtcccagctactcaggaggctgaggcaggagaactgcttgaactaggaggtggaggttgtgatgagccaagatcacgccactgtgctcctgcctgggtgacagagcaagaccatgtttcaaaaaaaacaaagtgttaactatttattttatcagtatggtcaacaataagctattaatagttaagtttttggggagtcaaaggctatacacagattttcgattgtactggggtcagtgcccctagccccctcattgttcaagcgtcaacaatactacacttcgtagcataaagcaaagcaaattattttaaagttcgggagatcagaaatccacaatgggtctagctggaatataataaagatgtcagcagggcatcattccttctggaggctctagggaagggaagaatctatttctttctctcctttttgtttttttaagagatggggtcttgctatcttgcctaggatggagtccagtggtatgatcatggctcacagcaaccttgaccttctgggctcaggtgatcctcctgcctcagcctcctgagtagctgagactacaggtgtgtgtcaccatgcccagctaatttttttttattttttgtagaaacaaggtctcatcattttgcccaggcatgtcttgaactcttaggctcaaggagtcctcccacctcagctgcccaaagtgttgagattacaggcatgaggccctgtgcctggctaagaatccgtttctttgcatttttcagcttctagaggcacccacattccttggctatggccttgtccatcttcacagtcagcaaggcctggtcaagtcacatcatattcactctgactctgacccttctgccttttttccccatttaaggaccctcgtgattacacaggtccacccagataatccagtgtaatttctctatcttaatgttagctgattagcaaccttaattcctccctcccatgtaattggaaacatacaggttatagggttaggatgtgggcatcttgggaagccactattctgccattcactctggcttaacttttttttttttaattgaacttttcactgaaacataacaatatggggaaggtgcccacatcacacctctaggccactgtggggtcagggtaggggcagcacacacccaggtcatggctgtgcagagagggctgggtaccagggcaaaaagagagtcctgccatgaaggaggaggagggaatgcatttgttcattcattaagcatgtatattgagctcttgctgtgggctatagatacagtggtaagcaaggtggacggaaacccctaccctcaaggggttcccagttagtgaaatggacaaaataaggcagaccaaagcactctaatatgccacgggtcatttttcttcctcttagtgatgtacattgcagctattcctgtttgtggggagcagttaggttcctttacatctagagtgaggtggcacaacagcatatgctgtcgggaagaagctgggtatcagccaactttccccatgcagcacgtttttctctgttgccacctggcattgtggaggccactgtagctggagcctgggtgccacactgctccttccaagtccagtgcctctgtgtgtctgagtgctctctcctgggcatccgctctgcatcctcctctgtgctcccctcacagactccattcatactccttgtgccaactgttttttcctccctctcctcttcctttccttattctgttctttcctcttcctttccttattccttattttcctcttccttattctgtgtttccctctcttcctttcctggtttgcaaaactatatttttaaatggtcaaagccacttgaaccttgaacgtttcaaaataattagttttatccttcctcttcccatctcaccacaaactcttttgccgtggaacagagattaagggacatttccagtttttgcttctttcagacttggaaactagacccaaagtcaaactgtcagttctaaagcaaggcatctctgaagaaatatccaacagtgtcatcttggtagaaagattcctgtgggatggtctgtggtactgcaggggtgaggacactgagggccactgggaatggagttgtgagagtctagagagcctggcagtgccggtggccttcacgcctgtgaagacgcctgttctggagcagtggcagaggaatgggtttggggaaaacataagtctgaaccctgatctcccacatcaaccaatgactcctgaaagacaaagcccccacacatggggaacacgtggaaaaagggagaagccagacctaaatgttttacagaaaacctgtgtaaaagagaaaccctacaaatgtcaggaatgcggaaaggcctttagtcacagctcagcacttatcgaacaccaccggacgcacacaggagagagaccttacgaatgtcacgaatgcttaaaaggcttccggaacagctcggcacttaccaaacaccagagaatccatactggggagaaaccctataaatgcactcagtgtgggaggaccttcaaccaaattgccccactgatccagcaccagagaactcacacaggtgagaagccctatgaatgcagcgaatgtgggaaatccttcagttttaggtcctccttcagccagcacgagcgaactcacacaggcgagaagccctacgagtgcagtgagtgtgggaaagccttccggcaaagcatccacctcacccagcatctgcgaatccacactggggagaaaccctatcagtgtggtgagtgtggcaaggccttcagccacagctcatccttgaccaaacaccagcgaatccacacaggggagaagccctacgagtgccatgagtgtggaaaagccttcacccagatcacaccactgattcagcaccagaggacccacacaggagaaaagccctatgagtgtggtgagtgtgggaaagccttcagtcagagcacactcctgaccgagcatcggaggattcacacaggagagaagccctatggatgcaacgagtgtgggaaaaccttcagccacagctcctcactcagccagcatgagcggacacacacaggagagaagccctatgagtgcagtcagtgtgggaaggccttccggcagagcacacacctcacccaacaccagcgaatccacacaggggagaagccctatgaatgcaatgactgcggcaaggcattcagtcacagctcgtccctcaccaaacatcagcgaatccacactggggagaagccctacgaatgcaaccagtgtggcagagccttcagccagcttgctcccctcattcagcatcagaggatccacacaggagagaaaccctatgaatgtaaccagtgtggcagagccttcagccagagctcccttctcatcgaacaccagaggattcacaccaaggaaaagccgtatgggtgcaatgagtgtgggaaatccttcagccacagctcctcgctcagccagcacgaaaggacgcacactggggaaaagccctatgagtgtcacgattgcggaaagtcctttaggcagagcacccacctcactcagcaccggaggatccacacaggagagaagccatatgcatgcagggactgtggaaaggcctttacccacagctcctcccttaccaagcaccagagaactcacactggataaacccactccacatgtgctggggacataggaagaccttaagccatagctcatccctttctagatttgacccaatcatacacatgagaaacgtacattcatacacaagccttttcacacagcactcccctcagacaccctcagagagttcacactgatgggaaatgaccatgggaccaccaagctctaggtcatccatctctgcatccaaatagtagggaaacgtggagataatcaacactcaggaccttcagccttgaacgcccattagtgctatgttatagaacctacaaaaaagaaatggaacaaatgtagtggatccagggaacgcttttgtccaaggattcaccgtattccaaaccagagatgttcaaattggtgagaaacccaacaaatgcctttcatatatacgagaaccaaatgaagtcagaatttgccattattgcacatcacatttttgggggggaaagtgcttatgaatggtgcaggttgactctgatattcattcccaaatgacagtatggcagagtgttccagaaatgagagtggcatctttatggaatcactgtggatactgactgtctcagtaaacagctgtcttgtctgtgtgtatattgtttgatcagggtacatggcagccagtcacagattggaattacatatgacaaagtatcagtgtactataaacaggtttttagttatccctgcattatttttgcaattaatctttatatgcaatgagattgaaaagctttgtatgggaagactcaaaatgtaaagctgcttccgtagagtctcactgattctgagatggcttttgctgctctgttctccctctacatttctctgcagaactcgcgttagaaacacagatatttgttttacaaaaagggagatttttcctttgttaaaccatcgtcttataagcaatagcaaattcatgttagaaacttctgttttgcaagattcatcttttttgggatatgttcaagttaatcctctcaaactgctttttcattgttttcatacaatttaacattttgttaaaccctaagtccacaaatagcagtctttctgacaactataacctttaaatggtgacttgctgccctcattagaaattgcattggctggccaggcgcggtgacttatgcctgtaatcccagcactttgggaggccaaggtgggaggatcacctgaggtcgggagatggaggttgcagtgagctgagatcgtaccattgcactccagcctgggcaacaagagtgaaactctgtctcagaaaaaaaaaaaaaaattgcattggctgtttttggttattagctgttagttgtggttacatccatcaatttgatttttctaatcccaatgctgggatataaatttccagttacttgaaatttctctcttggggagaccatgttgcagatagtcttccaatattgcttctcattatgattgtggagtgcctcttgggataaatgcctttgtcatttacaagccaccggagagccaggcatggctgcacctgcctctagtcccagctgcttgggaggttgaggcaggaggatcacttgaacccaggagttctgggctgtagtgtgctctactgattgggtgtccacactaagtttggcatcaatatgatgacctcctgggagcagatgaccaccagcttgcctatgtaggggtgaaccagagcaggtcaaaactcccatgctggtagggctcacatctgtaatcccggcactttgggaggccaaggtgggcagatcacctgaggtcaggagttcaggaccagcctggccaacatggtgacaccccgtctctactgaaattacaaaattagctgggcacggtggtgcatgcttgtaatctcagcaattttggaggctgaggcagtagaatcacttgagcctgggaggcggaggttacagtgagcctagattgtgccaatgtactccagcctatgtgacaagagtaaaactcaacctcaaaaaaaaaaaaaaaactcccatgctgatcattagtgggatcgtgcctatgaatagccactgtgctccagcctgggcaacacagcgagacaccatctctaaaaaataaaagccactggagaaagccagggtacacagtgcatagcagcactgtctcattgaaacaatgcaagtcatataaataactttaaatattctggtagccccatttaaaaaacaagaagaggcccaggcacagtggctcatgcctgtaatcccagcactttgggaggctgaggtgggcagatcagttgaggccagcctgcccaacatggcgaaaccatgtctctgctaaaaatacaaaaattagctgggtgcagtggcatgcacctgtaatcccagctactcgggaggctgaggcacgagaattgcttgagcctgggaggcgtcagtgagccaagattgcaccactgcactctagcctgggtgacagagcaagactgtctcaaaaagaaagaaaacgcaagaagaaacaggtgaaactaaaatttacccctatatatctcaaatgttagcagtttaacataccaatatgaaaaattattgagatatttgcattctttctgttacgtgacatcttcagaatctagtgtgcatctttttttttttttttttttttgagacggagcctccctctgtcacccaggctggagtgcaatggcacaatcttggctcactgcaacctccgcctcccgggttcaagtgattctcctacctcagcctcccgagtacctgggactacaggcatgtgccaccacgcctggctaattttgtagttttagtagagatggggtttctccatgttggtcaggctggtctcgaactcctgacctcatgtgatccgcccgcctcggcctcccagagtgctgggattacaggcgtgagccaccactcccagcctagtgtgcatcttatacttgcatcacatctcagagttgaccatagcgacatttcaagtgcccatttgacacgtgcagctcaacagtttggtctttggtcagctgttttgtcctccttccctttactacctgtgtcctcctgcctttccctgtgttcctatccttgtgtagcatcttgtgctcaaggaaaccaaatgtgctaggaagatctgctgctttaggtaattggaatgacaggtgcctactcatttcaggctccctaggatattattcttatcacagaacattacattcaggaaagagattatggccagtctattccagttcagttcagtaaaaatggaatctggcacatgcacttttgcagtcctttgaaagtgctagattggcataatcaccaagaaacggtaatgtgagttctttcctctccactcagcccctcttcatcagacctccttcagcgacacaggggaaatacagcaaggattgggtactacagagaggtgcccacagtatcacttctctcctaagccagggaaagagatgagattcctctccctgatggtgccaagccagtggaagggcactgtgggggttacaccctcctgagtctagaggaccttgcttactacgcctcagttattggcacacaagtagaagatcaagtgggaaaacaggtgaatgcaggtgaaataagaatgagggagagttctgaggctagttcagaaaaggccatacagcgtctgtctttttttgctggaacacttgtgcttggagccctgagacaccacttgagaaacccactggcccaaggccaccatgctgtgaggatgaagccacacaggctctgctcagggtgtcagttcactcctagtctgaatctccccagcctcatcaggcctgtgacagaacagtcttcagatgattccagcctcccagctttcaaggtacctcagccttcaagttcccagctgaggccccacacatggtggagccgaccaaagtcataaagtcatccttgaatgtgccttttttttttttttgagacagagtctagctctgttgcccaggccggagtgcaatggcatgatcaaggctcactgcagcctccacctcctgggctcaagtaattctcctgcctcagcctcccaagtagctgtgattacaggtgtgtgccaccgtgcctggctaatttttgtatttttagtagagacaaggtttcaccatgttggccaggctggtctcaaactcctgacctcaggtgatccacccgccttggtctcccaaagtgctgggattacaggagcaagtcactgcacccagcctgaggtctgtttttttaactgtgcaggcagccgctccactccacactgcctcttgctcctcctctggccatgtgatatgtctgctcctacttccccttccaccatgagtaaaagcttcctgaggcctccccagaagctgagcagatgccagtgccctgcttcctgtacagcctgcagaactatgagcctgttaaacctctcttttttataaattactcaatctcaggcatttcttgatagtaacacaagaacggcctaacacagtgagcacagtttctgggtgtgcagccatgagactgagaggaaggtctggttctttagcaaggaaaggttctgtctctttctggatgcaaagggagaagtatgctgcctaccacctgcaagcacagagaggaccatcctgtacagagtcaactcagagaagacagcaaagcccaaactcatctacaattcaagcaggggccccaccctggaccttgcatcctggtctttcacagcaaataaataataacctcagctgggcgtggtggctcatgcctgtaatcccagcactttgggaggcttgctcgaacccaggagttcaagaccagcctgggcaacatagtgagaccccatctatacaacagataaaaaattagccagtcatggtagcgtgtgcctgtactcccagctacgcagtaggctaaggcaggactatcacttgaacccaggtatttgaggctgcagtgaggtatggtttcaccactgcactccagaccatgtttctaaaaaaaaaaaaagtaaataatatcctaaagtgtatacaattttgagttggatttctggtgactggcagccaaaaatgcatcttgagtggaagaatcgtagaaagtagagaattaagtatcctttggcttcccattgtgtttctgaaaaaaagtcaggaaagctggtgcgatggtttggatatttgtcccctccaaatctcatgttgaaatgtgatccccagtgttggaggtggggcctagtgtgaggtatgtgggctatggggtggatcccacatgaatggcttagtgctgtcctcatggtaatgagtgagttctccctttatgagttcacccaagagatggttatttaaaggagcctggcacttcctcccctctctcttgttttctctctcactatatgatgcaccagctcccctttgccttccgccatgattggaagcttcctgaggcctccccatagtgcagatgccagcactatgcttcctgtacagcctgcagaaccgtgagccaaataaatctcttttctttgtaaattacccatcctcaggtattcctttatagccgtgtaaacagactaacacagccagggccgttggaagttttgtggaagcactgggtaggactgacgtgtggtagtcactgtccctcctgagtctcctcttatactgtatgtgagagggagattctttcaggcagcaagtattttccaagcaccaactatagctcaggcacaattccagactctggcaactaaactgatgaaactcgtggtctcaggagcttatattttggtggggaaatggaaaatagagaaattaggatgttatgggcacattacacagtaagtgttatgtagaaacaaaatggtccaagaagggaaaccccaggctgggcgcagtggctcaagcctgtaatcccagcactttgtgaggccaaggcaggcagattgcctgaggtcgagagttcaagaccagcctggccaacatggagaaaccccgtctctactaaaaacacaaaattagccgggcatggtggcacgtgcctgtactcccagctactagggaggctgaggcaggagaatctcttgaaaccggaaggcagaggttgaagtgagccgagttcgcacaattgcactccagcctgggcaacaagagcgaaactccgcctcaaaaaaaaaaaaaaaaaagaagaagggaaaccccaagtcctctggacttttttttttttttttttttttttttttttgaggtagggttttgctttgtcacgaaggctgtagcttcaacctcctgggctcaaatgatctatctgtcccacctcagcctcctgagtaggtgggactacaggcatgtgccaccatgcctggttaacttttaaatttttttagagatgaggtcttgctatgttgcccaggctggtctcaaactcctgggcccaagcgatcctcttgtctcagcctcccaaatgctgggattacaggcatgagccactgcgcacagcctctctggacttctcagttacctgagccaattcattcctttttggtttagccccatggcaggtaacacaaattcaatccaattaaagaaacacaactagtaagctgggtgtggtggctcatgcctgtaatcccagcactttgggaagccaagatggatggatcatttgaggtcagcagtttgagaccagcctggtcaacatggtgaaatcctgtctctactaaaaatacaaaaaatatatatatatatattagccatgcgtggtggtgcgtgcctttactgccagctacttgggaggctgaggcaggagagttgcttgaacccgggaggcagaggttgcactaaaccaggattgcaccactacactgtagcctgggcaacagagaaaggctctgtctcaaaaaaaaaaaaaaaaaagagaaaacacacacacacacacacacacacacacacacacaactggtaaattacctgcccctcaaagtgcagtgatgattaaatgagctcctggaatcccaaagcgtgtggcaaagtataaagtgaatgtaaaacatccgttcatttgcgttacttgtaaaactgtcatgcccattaaatgcccaaaaaaagaggctgtttctgaagacagtctctttgttatagtacacacatactttatatagcagcacacagatgtatatatttagataccgtatacattcttatagagaggaggaggtttaagctttagctgtccttaggagaagccaagagtgacaccatgaaaccacacatcgctggctcacatctgaactcagtgatttagatttctgctgggaggcttttctgccttcaaaggccgctccatgccatttctttttctttctttctttttttttttttttaaatccttagggtcttactctgtcacccaggctggagggcagtggtgtgatcatagttctctgtagcctggaactcctgggcttaaacaatcctgccttagcctccttagtagctgagactacaggcatgcaccaccatgcccagctaattttttattttttattaagacaggggcccactatgttgtccaggctggtctcgaactcccagactcaagcaatcctcccaccttggcctcccaaagcacttggattatagtcatgagccaccactccaccatggtccacgcatttctgtcacacactcacccccaagttctgtttattttaggagagtgagggctttaaaggaaggtctcagggtttactgtcaaaggaattgattcgtttattcttctctttgagcccagagtaaacaagtataaaccacacagaaaatgcccctggccctatgtgggttgcaagttagtgggcaagataggcaaagcaagtcatcagaagaaaagcaaggtgagtcatagcggagaaaacacagtaagacgggccagacgcagtggttcacacctgtaatttcaacactttgtgaggctgaggcgggtggatcacctgaggtcaggagttcgagaccagcctggagaacatggtgaaaccctgtctttactaaaaaatacaaaaattacccaggcatggtggcagaagcctgtaatcccagctactcgggaggctgaggcagaagaattgcttgcagtgagccgagattgtgccactgcactccagcctgggcgacaagagcaagactttgtctcaaaaaaaaaaaaaaaaaaaaaagtgataagatgaataccagcccagagatgataacaacttggggattattgtgtttggtgaatggggtgagggacgtcacattaaaaccatggcatcagggcaaacctccgtgaaaagacaggcagagccacagctggagagacctccccagtactggggccttggtgaggagctggggagcttagatttaccatgtcccagaagccaccctctcactgagcagatttccctggcagttgcccccatcgcatgtggctggtccctcaggagcctgtgtctcaagagctacctggtcagccagaggctggactttggaaagctgttcatttcattgagacatctgggaacctttctacaaattcatgttctctcgagttgagggaaggctgggctgcactatgttttgaggctctggcttcatggatttgccatgaaagtaagctgaaactctaggtccctcactttcagggatcccttcaagaccaagcgcctaattttatctttgtaattttgaattattcttctgaagagggacccctcagttgtgtgagccttaggcccaacaaatctggatcgacccctggttccagcaaccctcgtcttagagacttctgcatggacactgggaagacagaacccagcactgccaagggtaatggatctcccattttgatgtgagtgaaaaccacctgaaggtggagggtgttaaacctgggaccttgctttggttggtccgagggggtttggtaatctgcacaccaaggcactgggtgattctgaaacagacccggaagcctcaagtgagaactgtgcccaaacttcctgaagcagtttgtctgcgaagcccatagttcccaagtgtggccccatcccaggagcctctcaggttgaaggaacagctactaataaatcactgacttcactggactcagggtaggcagaatggagtatctgcctttctttgcatcaaaagcacatcaccctatcctgttctgtatctgcctgaaggaagtccacagggtattcccgagacccatcagacacctcactcattttttcatgatacccaagagacacacttagaatgtacgcagactacacatataccaaacacattatactcacatctcataccctgaaaaatgactgggagacataaatacactgagatgtcaaaaggagtagtctgttgcccaggctggagtgcagtggcacgatctcggctcactgcaacctctgcctctgggttcaaatgattcttgtgcctcagcctcttgaagtagctgggactacaggcacgcaccaccatgcctaggtaatttttttgtatttgtactagagtcaaggtttcaccatgttggccaagctggtcttgaactcctgacttcaggtgatcctcccacctgggcctgtcaaagtgctgggattacaggcatgagccacagtgcccggccgaatctgtgtttttaacttttacataattgggagaattctttttaaaatggtgaaaaatgaactttattataaaagcccatggctgggcgcggtggctcacacctagcactttgggaggttgaggtgggcagatcacttgaggccaggggttcgagaccagtctggccaacatggtgaaaccccatctctactaaaaatacaaaagttagccgggcatggtggcaggggcctgtaatcccagctattcagtacaccacggcgagagaatcgcttgaacctgggaggcagagcttccagtgagctgaaattgtgccactgcactccagcctgggtgacagaacgaggctctgtctcaaaaaaaaaacaaaaaaaactttcaaaggaatttaaaaaactgaaataaatgtcctcataatttcatgaccctaacacaactactctttgcatttctatactttgtctgctaggatttgacaactaatgcccactgtttacacagttgcaacagaatcaacagttacattctacttgaactacacttacaaattactcttccagcgccgggcgcggtggctaacgcttgtaatccccagcactttgggaggctgaggcgggtggatcatgaggacgtgagtttgagaccagcctgaccaatatgatgaaaccccgtctctactaaaaatacaaaaattagccaggtgtggtggtgcgcacctgtaatccagctactccggaggctgaggcaggagaattgcttggagctgggagacggaggttgcagtgagctgagatcacgccattgtactccagcctgggcaacagagcgagagcgagactctgtctaaaaaaaaaaaattcttcgattttgctagtcttaattatcatttatgcctttttactattgctttgaatggctctaccattcatatttaagtcatagtatttaacttcatgcaaaccagcatccttgtgtatatatatatttttggtccttttttttcctttttgtggaggaaaaagtggggtctcactatgttgcccagggaggtcttgaactcctgggctcaagggatcctcccaccttggcctcccaaagtgttgggattataggtgtgaaccactgtgcctggccccgtattgttactgaatacagttggactgttagctttccaaaatgattgcactagttgacactgattcataaaactctcctcaactcaaatagtgatggcagacatgtatttgtctgcttgggttgtgatcacaaaataccacaggctgggaagctgaatcaacaggaatttattaatattttctccctgttctggaggctggaagtcagagtgggttccacgtgaagcctctcttccaagcttgtagatggttgccatcctgctgtgtctgcacctgcctatggcctttcctctgtgtgtgcatggagagggagcaatctctggcgtctcttgctatctcttttttttttttttttttgagatggagtctcgctctgtcgcccaggctggagtgcggtggtgtgatctcagttcactgcaaccttcacctcccaggttcaagttattctcttgcctcagcctcccaagtagctgggattacagatgcctgccaccacacctggctaatttttcgtagagatagggttttaccatattggccagactggtctcgaactcctgacctcaggtaatccacctgcctcagcctcccgaagtgctggtacaggcgtgagccactgtgcgtggtcctccctctctttttttgagacagcgtcttgctctgtcacccaggttggagtgcgtggtgtatcacagctcactgcagctttgacctccagggctcatgtcatcctcccacctcggccccccacgcagctgggactacaggtacatgccaccacacccagctaatttttaagttttttgtagagacgaggtctagctgtgttgcccaggctggctcctgggctcaagggatccctctgcctcagcctcctaaagtgctggggttacaagtgtgagtcacctcgcccagcctcttgcttttcttataaggacactagtcctattggatgcaggcgccactccaacgacctcatttagcctatttacctccccaaaggccttgtctccacatatcatcagattgtgggttaaggcttcaacatatgacatttaattcagctcgtaccagagggtgtttaagcattttcccattgaaatgtattcccatctttccaggtgtccatctctcatttgcttttcctacttacttagaacacagctaccttccgacaccctgtataaacccaccctgaactctacccctcttcactgccaacctgcctggggttttcccttgccccctagagagctctgtgtcctttcgcacacatcccatccctgccaactccactggacagacctgagccaccctctcctgcctcaccccacccatctttcttgctggtccacgttgccacactgttgtatgggagctgagacccactgcctcaaatgcctgaaccagcccagctgcccctgaggttaacaagtgggaatgtctagcttaataaaacatccatttgtgctccttacatcctgggcagggtggtagtggtaggagaacagcaaacaaatcctgaaatctcaatcagttcacttttggtagtggtttgggaaaggaaattctgaaactatattagagttattttaagattcatcaaattagtaaaatgctgaattttggggtgtcagggttctcagtgttaaagaagacacataaaaatatgggctggaggaagtcatgaattgagttggaggtcttactggatatgtacgtgtatgtgcacagacacacctttgtgtgtgacctgtgtgcaatcatatgcacatatatttcatagctcagcagaagacacctcaactggcaccctatcttggtctctaatgccattacccactaaaaggaaccagttcttcaaagacatggccaatttcagggctgaggaagggtagaaaggagatgggcttggaacatcctactacaccaaaaagcaaataagtgctaaaaaaaaaaaatggaggcatgtcacaaggatgcaggagtcaactgaagggagtctcactggcctcatctaggacaacttgagcaccaaaataagatcagcagcgagttataaaccactgaataaacagaaatcctgagtccattccaacaataaagacaaattcttggggagaaggaagagtgctggctggcagtaggatgctgagggcctgctggtcagcatggagggagggctggtgttggaaaatcaccaccctggtaatgatggattcaggcaagaatcataaatgaaagccaaatttagggggaagttttgatgaggagcaggatatttgcattatctttaatctttttgtgacaactgaagatcattgatacttgcatgatcttaaagtatcttcccaccgattcttattcgttaaaaggagaaaaagttaactatattctttttttgagacagggtcttgctctgtcacccaggctggagtgcagtggctcaatctcagctcactgcaaccttgacctcccagtttcaagccatcctcccacctcagcctcccaagtagctgggactacgggtgtgcaccaccgtgcccagcttcagcctcacaagtgctgagattacaggtgtaagcctctgcatctggcccagttagccatacagtggaaaaactgcactctaaccaggtgagcaaagagaacatcactgacaggaggaatgtggacaccgtgcaccctggatgggatgggggaaggcgcacacatgcaggccacaggtaagcagggtcgaatgttaataggtgggtctggatgagggtttgtggatgatctgtgcactattgtattttatttattgattttttttttgacacagagtctcgctctgtcacccaggctggagtgcagtggcgcgatctcagctcactgcaagctccgcctcccaggttcacgccattctcctccctcagcctcccgagtacctgggactataggtgcccaccaccacgcccggctagttttttttgtatttttttagtagagacggggtttcaccatgttagccaggatggtctcgatctcctgacctcatgatacgcccgcctcggcctcccaaagtgctgggattacaggcgtgagccaccgcgcccggccaatctgtgcactattttaattcttgtgcctttttaaaatataagtttgtaattatttccaaatagaaaactttaaaaaaaaaaggcatagacatctggctgtgcactaaatgagacaggagatgggaaactgaaggtggtgaagccctataacaaatgacgatcacccacagcctgagagctgagtgggacacatcacaggggatgctccctgtggcagtgcaagaaggtgagctcacaggttcggctgagaaatgggagggtacattttagcctttttcttttctttttttttttttaatgagatggagtctcgctctgtcccccaggcaggagtgcagtggtgtgatcttggctcactgcaacttccgcctccccggttcaagcgattcccctgcctcagcctcctgagtagctgaaatcacaggtgcctgccaccacgcctggctcattttttgtatttttagtagagatggagtttccccatgttggccaggctgcttttgaactcctgacctcaggtgatccacctgcctctgcctctcaaagtgctgggattacaggcgtgagccaccgtgcccagaccattttagcctttttcttaccagaaccacactcagcttggggcttaagatggataggctaagaggggaactaagcttgtaactgttgcggagacaggcactccaggtgacagttcacaggccctttcaagtgactggagccatgggatcatttctctccaaggatttgtgagtagaagtgatgtgtgtcatctcccaggtgaacaggttcggccttccctacatgctccaagggtacagtgaagagcagagctacaacagagatggggcctggatccctgaatcactgtatggagcagagtgcaaaccaatatataagcaacagcaacaccaacacaggacaatcgactgttagtaaataatttttttttctttttttcttttttttctgagatggagtcttgcactgtcacctaggctagggtgcagtggcacaatcttggcttactgcaacctccgcctcccaggttcaagcaattctcctgcctcagcctcctgagtagctgggattacaggcacgcatcaccacagctggctaattttttgtatttttagtagagacagggtttcaccatgttggccaggctggtctcaaactccatgatctgcctgcctcagcctcacaaagtgttgggattacaggtgtgagccaccacgcccggcccatgaataagtacttactaagtctctgtgatttgggggtcattacaacagactgcctgctcaaacacagtgacagaaaaagaggcaccagtttctgtatctacagggagcagttaagtttatgcgcagggagcagttaagtttatgcgcaggcaatgggaatgatactgtaatcttgagaataaatgcaatcaatgaaaagatcaccttatgtagcccaaggagtttagtctcctttgctcagacagacagatctttattagtgttttcaacttattttgctcacaacttcccagcaagaaatgtcttacattgcaaccagttctcacatttagatgtatgggtgaaaagtttcacaaaacagtatttgcctttactacatgatgcattctggcctactttattctgcttcattgctgtgtaatgctggtgaccacttgctaattgatttcccattttactaaatgggctgggacccacggtctgaaaaccctgccttaggctgcaagcatttctgtgatctctgcgagctactccatataggtaaacacacgcgaggtaaactaggaaacagcttctgcttttgcagattagaagtgaagttgacatcacgccaagtacgaaaaggctaaacagctgacaaaatttccacttgagcaaccctggggagcgcaaacaggaggaatcggggcaagggtgacttgaagaaagcactggcagatcacgcactttaaggcaactctacactgcacaatgtcaaataacctagcatggggcggcactaaatggctgcaggaaagccgagtcttcttccacatccggcggctcccctcggatgcgagcgctggcccagggtgtgtttacagaggtgagggcttcccgtggacccttctcgttgggagcgcttagcctcaggagcggattcagggcacaggcagaggacgtccacaaacaccacaggaagccgccacccaggggcgtggaaaggcccaatgcctcgtctgggattcacggccggcaaagcggcccctccggaacgggacagcacagcggctcacctctgcgcctctgggggtgcggggggagcctcgccctccacgctctctgggggaccgcccgccctagcccccgcctgggcttcgcgggtggacggttgggggccccgggcgccccccagcgcgtagcttttctccttctcgtgggtcttctggtgctcggctagggccaggctgaagtggaaggtcttccagcagccctgacaggcgtagcgcttccggccgccatggctgctgtggtgctccatcaggtgcgagagccacgcgaaggcctccccgcactcgccgcaggcatagggcttcccgcgggacaagcccggctcgtcagccccagggccctgcccggcctccagccctgcgctgtcgccggagctagagacgccctcgaggctctgcccgtccccatcctcggggtgcggcctcttggttcccagtttcgccgtgcccctgtccggggcaggctgctggatgacggactgcctctgcgatccggtggcagagtcggactccgcgtcctgggggtcctgcgggtccggggccttcccaggctgctcttcctcctcctcagtggtgcccgacgggggatcggcaagggcgtccccagggggcgcctccgtaggcagctcaggcagcacccccgcgggggcggcctcctcgcaggcgcacccagcgctctcctgccgcctcccgccttctggaacaaggtcagagccctagcgtgagcgccccgcccagggccagggagaggaggacccagccgagcctcagctgccggaacagcgcacagggctccgggctctggatccccgcggggctcacggctgtttggaagcagcgctgtccctcccaggcagccctgcagcgcatgccccgcgcctgctgctgcagatgtgggacctggaggcctccaacaacggaggccaccgacaggacaggaaggacagccccactgagcccgggttctggaaaccgcgcctttggaggtctccacctggccactagcttggccacaagatgcacgatgcaaggagagcctgctcagagcgcaccctcctggagggaggggcccggctgccagcgaagagagtggggtcaatagctaaggccaaaccccccagcgacaagccccctggcgacaggcacccagggccctccagcccaagtccgcctctaggtgttcttgttggtgtgctggcacagagcctccaatggggcagaacggccacccccgggaccagtcatacacagatcctggcaactaacaccactgccgtttccaccgaccaagtcttggggtggtctgtcatgcagcaagagaccatggacgtaactggattcctgcctcactcagacacggtggtgggagaatggtgaagcagtcaatgctgaggtctttgctggggctgatggcgctgggaggggccccctcagcctctgaagaaaaagcaaaccccacccggccctaacaccaattcaacccaacctcacctgggaggctgcttccttgtggatctctttccaccaaccggagttcctcagtgtccagcctggaggcagcgtcaggctgggaaagctgataccctgagtggggttaaaaaccaaagaaataaaaggcatcaacacagagtggctgatgggtgttgtgtgtcgtgggccagccagggcaggctgcagcccacctcctcttctctgtactgggacccccaccaaggccacctccctgttaggcccctggacagtggagcaaagaagaaggcgaggctggaagggcaacggggcaggcggaggcaggactcagagaaagcaaagctaaagaaagacattgacaaaaattgctcaggagtctgagtcggggggcctccctaaaaggagggtttctggggcaagaacgtctacaaaagaggagacccttgatcaggccatgcaggtgaggccctgtatctggcaaggagggtggcaatgtgggcgccttggggccaggaggcctttccaaattccgaggcttcagtcctacaggcagggcctgggcagaactcagatgtttagatcagaaagggtgggggcttcagcgaataaattcaagctccaacacgtgcaagttcaaatcctgtaagacatcacagtgtcccagccaaagtccctggggtcacagtctcctgcaccaacccctgcggaaggggatggggagtggggcgtgaccccgaggcaggcgactctcaccccacaggagcagcttccggtagctcttcaggttctcctcggcagggtccaggtggccccactcccccaggtgctgagggtcctctggaaaggacttcagcttctgaaacattagtcgtggctgagacctcccacctgccctagagaagggaggacccgccgcagccccacagccacaggagcaggctaggagccagccctggccagggactctaacccaggtgcactgcaggaggcagcccccttcgcaccacaaagattccgccctcacgctcccaccagggtgggttctgggcctcagcgctgtggacgtttggggccacagccctctgctgagcactggtgatggggagggggatgcctctaagctgaggccaaggcccctcacccacctgctcgtgcccacccacctgctcggtgttggcagggccgtcctcttcggtctttgcttctctgaccctcctctgttccagaaacagggggtccggagaaagccaggctggggagaaggagaggcagagctgaggcaatgagctccctgtggccaggtgccctcaagggtcaaggagcccccgctgcctcccacacaggccccagtgtgcttctgtgacagcagcacccaaggctcaacggacactacacctttccctgatttacaaagcagcgcggtggccacagggcttgggtggccccagagatgcccattcaagtccactggattcatggaaatcttttttttttttggtttgtttgttttttaaagacagggtcttgctctgtcacctaggctggagtgcagtggcatgatcttggctcactgcaacctccacctcctggactcaagcaatcctcccacctcagcctcccaagtagctgggactaaaagtgcggacccggctaatttttgtattttttgtagagatggggtctccctatgttgcccaggctggtctcgaatgcccgggctcaagtgatctgcccgccttggcttcccaaagtgctgcgattacaggcatgaggcactgtgcctggccttcgtggaaatcctaaaaagcaacaccacatagtgctgggctgtatccaggccagtgggcaccttccgtgctggtaatgaacagccacaaaacttctggaaaaccacatggaagtttctattttatgtgaaatgtcgaactcacacaccacttgcccagtggtcctgaggagtccacccacagtgcccagagcctcacatatgggcacacaagtcaggaggtgtcagggcagcttcactccaaggggcagagagcccacctctaggatggggatgggctgagcacgcgatgctgggcaactaaagaaccagacccaaccacagcctgggggacccacccctcgaacagcaagcactcagacacagcacaccacacacacagagcccgaccccaggccctgattatgcatgtgtgatgtgcagggagacatgaggggacgtgcatcaggacacttgagaccctttattttcagagggttcatggtcgggggttgggagattcttttctttatgtattgatgtttcttcactatttgtggtaagtatggatgatctgcataatctctgaagactaatttaataaacaatgtctaacattcagagaaactacaggaggaagtcccaatgatagcatggaccatggagcccctgactccctggctgcccttctgccctctcccaaccacaggcctctgcccaacaccccacctaaggcccagcagaggctgccaggctagctgggcactcacgtgtctcagaaggtgccgggatctccccagctccaagggcctggctggggctcgcgagctcgcctggtagcagcagagggtccatgtgcctctcgtacactccatcgctaagaattgaggatgagcccgcaggggagcccagcagcatccctgtcaacagtggagggacctgtgaccccaagaggtcaggacacgtgccaacaacaatcacacagttaaaccacagggacctgcaggctccagggccacatcactacccatcctgcacctcatcttggaccaggagacctccagcctgcaaagtacccagaatatttactgttaagaggctgggggccgggcgcggtggctcacgcctgtaatcccagcactttgggaggccgaggcgggcggatcacgaggtcaggagatcgaggccatcccggctaaaacggtgaaaccccgtctctactaaaaatacaaaaaattagccgggcgtagtggcgggcgcctgtagtcccagctacttgggaggctgaggcaggagaatggcgtgaacccgggaggcggagcttgcagtgagccgagatcccgccactgcactccagcctgggcgacagagcgagactccgtctcaaaaaaaaaaaaaaaaaaaaaaaaaaaaaaaaaaaagaggctgggctgggtgtggtggctcacaactgtaatcccagcactttgggagaccaaggcgggcagatcacgaggtcaggagattgataccatcctggccaacatggtgaaaccctgtctttactaaaaatacaaacattagctgggcatcgtggcaggcgcctgtaatcccagctacttgggaggctgaggcaggagaattgcttgaacccaggaggtggaggttgcagtgagctgagattgcgccactgcgctccagcctagtgacagactgagactccgtctcaaaaataaataaataaataaataagtaaataaaagaggctggtccctttccctcattcctctggcttccttacatctagaaggcaggagcccaggcatctgtcctggcccgaggaccaaggagctgcctcagcagtgtggggaacttaactatctcaggcaagccatggctggcactggggccttccaggatcccctccccatctcctctgagccatgcttctcctctgtgacagcccacctggctcttccaggacatcagcgaggccctccaccagggaggctgccttcttgcagctctcagggtactgtgccaccacccagggccggaccttatcaggcaggatgcccaggaactgctccagcaccagcagctccagcatctgctccttggagcgcgcctcaggcatcagccactggcggcacagctcatgcagccgggccagggtctggtggggcccggcagcctcctggtagacaaattcccggaaacgcaggcgggagaactccaggtcagcaggggtcctctcagggatggtctcgggttcttcctgctggactccggctgctgaccccggcgtgggcagatccggcggggctggggagctcctgggggaggcaaacgccttctccaaaggcaacatctttccaaaacggcactggaaaatgtgactgtctagccagggacaaggtggctccaaaggagaggtgccagggatgaccagatgcccagtgggctcaggtggtgccagaacccacagacctgcagaggacacggacaaggcaatggccttgcataaggccagggcgcagccaccccagctgccagagaacaaagacaccacacccagagttcacacagatttccaagaaacccgcttgttaggcatcagtagaacctcagtgttgtactcatgtagataaaaagtagcatgtaaatggagggtaactcattctgtgcattaccagaatttttttttctttgagaccgagtcaccctctgtcacccaagctggagtgcagtggcgcaatctcggctcaatgcaacctctacctcccgggttcaagcgagtctcctgcctcagtctctccagtagctggaattacaagcatgcaccaccacacccagctactttttgtatttttagtggagatggggtttcaccatgttggccaggctggtctcaaactcctgacctcaaatggtccacccgcctcagcctcccaaagtgctgggattacaggtgtgagccactgcgcccagcatcattaccagaattttaaaaaatcagtcatgaataggatgaaaatgaaaaattacttgacaatctctatgtaaacctggatgtaaaaaccttgaaataggccaggcgcggtggctcacgcccataatcccagcactttggaaggctgagatgggtggataacctgaggtcaggagtttgagaccagcctgaccaacctggtgaaaccccgtctctactaaaaatacaaaactagctgggtgtggtggtgggtgcctgtattcccagctacttgggaggctgagacaggaggactgcttgaaccctgaggcagaggttgcagtaagccgagactgcgtcactgcactccagcctgggcaacggtgagactctgtctcaaaaaaaaaaaaaaaaaagatagattatagggatgtcaatttctaataacatgaaggagctaggtgtcaagactgttcctccagttaaaaccaccacaaatctgaaataaaattatttagaaaaaagcgtagggagcggggggctccctctggaggccactgaacaaccacccacctccccgtttctggaaatggtgcaggatgtaggctttgaccaaagcatccacagaaccaggcgggaggggcaggaagtacccaggagcaaggacaatggggggtggggggtgggggagaccacaatgactgagagagttcaggtcctgccaacctgtgccccaccctcagctgaatccccacatacagggcagccctatcattaagtgaagccagtattcaggatgaactctcttgattgtaactgtgcaccaacaatgagctcactaaacagaacccagcgggtcacagctgtccaggcctccagtcggcctcgggctctcatgtcactggctatggacacacaagggtgtgaactgcagctgtccaccttctcccaggaaccgcctgggtctgaaggtccacagagacagctggaaggggatttcccacagccgcagcaagcccagttttatagggaaaaccatagagtaaaccacaccaggccaggtgctgtgagcccttctcaggtcgtcaagttctgctctgacagtgctccaccagaatatggggcgcaaagacctcaccgctgtggggtggggtgtggtgtgtgattccacagaaatgaaacatctagaacaggcaaatctatggagacaaaatgtagatcagctgttgccaggggctggggtttgggggaatgaggagggactgctaatgggtacaggatttcttctttggttggtgaaaatgctcaacggtgagtactgcatattaaaaaccaatgaactgtccactttaaataggtaaacctcacagtatgtaaattacactcaataagctgtttaaaaaacaaaacaaaacaaaaaaacagggctgggcacagtggctgacgcctgtaatcccggcactttgggaggccgaggcaggcagatcacctgaggtcaggagttcgagaccagcctggtcaacatggtgaaactccctctctactaaaaatacaaaaattagctgggtgtggtggtgggtacctgtaattccagctactcaggaggcctgaggcaggaggatcgcttgaacctgggaggtggaggctgtagtgagctgagatcatgccactgcactccagcctgggtgacagagcgagactctgtctcaaaaaaaaaaaaaaaaaaaagaaccagaagtttgcagagagtcaactatcaacctctctctctgtggctaccagagtttaaagggaagtgcggaactcttaagtgctgttggaagacattctacacaagcttccacttacctcaagcagaacagagccatgccgtgccatcatcaccaccaccacgatacctctactttttttttttttttttttaaacacagggtcttactctgtcacccaggctggagtgcagtagcatgatcatagcttattgcagcctcaacctcctgagctcaagtgatcctcccaccccaacctcctgagtagctaggactaaaggtgcacatcacccacacctggctaatttttaatttgttttgtagagacagggatctcactatgttgcccaggctggtctgtaacttctggactcaagggatacgcctgcctgggcctcccaaagtgctgggattacaggcgtgagccactgcacccacccccacccttttgttacctcataggcctgagctctcaactggcccctccgggagacttttcctctgcactccttgcacgcacccacctgacacccgctcactgcccccgccttttacctccctactgaccgcctcccccactggaatgcatacccaggagagtaagggttcttcacaggcaggtcccttggcctgggcagagctggctcagtgtgtgtggactgtgcaaacagtgcagttctgctgaggggtatgctggctgtgcctcatttgtttttggcagttgtggaccctcatgtccatctctgtggggtcctttctgatctatttaaaggacatatggagaagcaggatagctagggcacaggggacaacctcacgaccgtcacctacttatggcagcccccaccggggtgccctctctcctcacacactccacctgctgccagaggaccctcagacccaagcatctgcctgctctgtgactgagcgctttctcatgatttaatctctgagggcgggtaaactgcccactttcccgtgactttttctttacagctctttctgtcaaccagttaacgagttccctgtctggctctatcttgctactgtccccatctgtggcttgtcttttcactccacgctgtcttttggtcacaggtaatgtcctaatgtttcttactatctaatgcaatcacttttttttttggagacggagtctcgccctgtcacccacgctggagtgctgtggcacaatgtcagctcaccacaacctccacctcctgggttcaagcagttctcctccctcagcctcccgagtcactggggttagaggcacttgccccatgcctagctaatttttgtatttttagtacagacggggtttcaccatgttggccaggctggtctcgaactgctgacctcaagtgatccacccgcctcggcctcccaaagtgccaggattacaagagtgagccactgcagccagccttcaaccattttttaaattggacttcggagttcagaaacccacttaaaaagggtttctttcccttgggattagaaatacatcctctcctttaggaggccaaggcaggcagatcacgaggtcaggagatcgagaccatcctggctaacaccgtgaaaccccatctctactaaaaatacaaaaaaaaaaataataataattagccaggcatggtggcaggcgcccgtagtcccagctactcaggaggccgaggcaggagaatggtgtgaacccggcaggcggagcttgcagtgagccgagatcgcgccactgcactccagcctgagcgacagagtgagactctgtctcaaaaaaaaaaaaaagaaatacatcctcttattcatcctccaggaacagagaatagcagatataaagggccagacagtctcagtttcaactactcaactctgcctcgtggcaagtaagcaaccagagccctgtgcgtacccacaggtttggcatgttcttatgcatcttcatttacaaaaacaggtggccaggtgtggtggctcacacctgtaatcccagcactttgggaggccacggtaggtggacagcttgagcccaggagctcaagaacagcctgggcaacataccaaaacttcatctctacaaaaaatagaaaaattagctaggcacagtggtgcatgcctgtggtcccagctactctggagactgaggttggaggatcacctgaacccaggaggtcaaggcttcagtgagctgtgatcacaacaccacattgcagcctgggtaacagagtgagaccctgtcgcaaaaaaaaaaaaaaaaaaaaaaaaaaaaaattagccaggcgtggtggcacacacctgtggtcccagctacatgggaggctaatgtgggaggaccccttaatcccaggagttggaggctgcagtgagctatgtttgtgccactgtactccagcataagcgacacagcaagatcctgtctctaatgaatacaaacaaaacaggtcactgctggcctgcaggtgggtacgctaacccctgttctggagcctctcctgatgggaggcgtgacgccagctctaccccctggcaatggaggcacagagctctacttggtgcatggacagaggtgtggtcctgcaggcatgtaattttggctttcttaggacgccagaggcttgttcaccttgcagagaacctgtctccacaaaacaaactgtgagctccataatgtgtgtgcacagaaccttccctcatcagaacctcacaatcccagaggggtaggaaccacatgcagccccaaggtgcaagtgggaaatagaggcacgaggcaggcaatcactaaggctgggaccccacctgcaaagtgacgctgccactcatccttccccgtccaggcccataagcctgccctttaagaggcctcctgccggccctcccctctagccctcatggcctccacagtgggcagatcccagccagctcccccagcccctctcctcctgctccaacttcccagctctgagcatggtggaggcatcggggtctaggtagaatgagcaagggtcctcggccattggcaggggcgggatgacgtggggaggacgggacaccctccggctgggtcactggccaagacagtgggggacacatgtcagcccctggggacaggaacgggagctcctcgcctctgtgcccttccccctcagcattacaagttgtgagcctctctgggaagccacctctgcctccacttcctccattcacctgcaaagcagaagcttccatggaaccaggggtctcctaaaacgcccaactccaaggaagctgctgcctcctgtgaaaacagcctctccctgttcatctcccttcctactgggaccctgatgctcacagccaggaggatgaggccatctcaagagcctccagaaatctctggccctgtgtcttcttgcctccttcagccccattcctggccacactgtcaagaggactctcagagatctcaccggggcaggtgcggcagcgtacatctataatctcagagcctggggagtcttaagcaggaggactgcttgagcccaggagttggaggctgtgattggccactgcactccagcctgggcgacagaatgagcccgtgtctcacaaacaaacaaaatagagataccactgggaccctttcctgccacagcctgcttgaatgaggccacacctcgttggagtctggcttggtcactgggcaaacctccctcccctaatcttgggactgtccaggatttgcctcagatgggattttcctggagcccagccccccagcctcagcaaatgaagcaatctgcacaagtcttgagccagtcctgtaggctttgctgcacccagaggcctggaatacagaagctgaggcagagagctccacggtgggtgaggggtggctgagctgaggggtcccaagcctggtgggtctccagagtcctgcagcaaatccccttcatcctgggctgagcagagctcaagcctggtttggccctccgtgggcccagccctggccacctgaggaatattcatcgcagctctccatcccaccacactcatcggcagggtctagcaaaccaccccacagccacaggcctgaggatcagccagggaagctcaatgcatgggatgtggttgttgatgggtcgccggatattcccagggtctgccctggcttcatccacagatcacttactcattataaaaaggggtaaaagtgcttttaaaagaatgaaaaaacatggagtaagggtcgtcgttcacatctcagctgccttttgtggtccctgatccactcgccaggacagacagaaccagagagatgtcctgcgcaactggcctaggctccccgaaaacccgaggccagaaatacccaggaagtcacagattcaagcatcatgcacagaaaacagcaactcgatgcgacacgtggtcccgctctgactccagggcaggaaaccatccgcaggacatgatgggatgggggaagtgaaatggaaccgaggaggtgacatggaaccaagtgactgtgccactcagcctcgcccaggagtcagcaaggacacaggcgaatatatgggaaagtggaaggagggcagacagaaatgggggaagcggggagggaaggtagcagggagagagaagacaggagaggaaggagcaagagcagggaaagccagatagtctggacgggggtagagggggattgggaaaaggaaggagcccaggagggtgagagaaaggaaatggggaaggagtgatgggagggtgagtcaggcccccaccccaaccccctgggtcaggaccgaagccagtacacccactcttgcctcttccacgagagaggtctccggggtgggcgcagacacctaactcaaacagaacccacccccaggtgactggggagaggcgagatattccaagggtgggggcagcagagacaatgcccattctaggcacccctttggtccccgcaccctccatcccttccctgctccagcccctggggccacagcctgcccagcgtccccccaccacggacaccctcacatcctcacaccctcagcccccacttcctcccctcctcttcccttcaggagcctccccctcccttctcttccccactcaggagcctccccctcccccttttcgcccccctcaggagccttcccctcccccctttctcccccatcaggagcctccccctccctcatctctcccccatcaggagccgccccttcctgttctcccacccacagggtgccctaagcgcctcccctccacgagcctacacggggtgggggttgcactagttccctacctgcctgcagggcccctcaccgatctggatctcagccacctccggggggacccggcccctgccccgcactccacgcgaagggatgccagaccctcggcctcctggacgcacagcgggggctcgcaccccaaccccgggaacaccctggcccctttccctaacgctgcccactgaggcgtcctcaccgtctaccctgttggggtcgctctctgacccccgcgctgcatccccgggaccgacccacctgctgcgcagctaccccaggccggtcccagccgcccggagccccagtgcgcgatggcggccggcaaactgcgcctgcgcactgggcctcaccgcggactacgactcccacaatgccgcgaggctgtgccgcgcaccggggcgagcaagggagccgtgacaggtgacagtgcgcatggccaatcagacgcgagtgtggcctcccggcgtcccgcccactccggcgcctgcgtcattttgggcaccatggcaacgaagtaaacaagcgggtaaataatagacccctgacagccagagacccggagaaacaaagacggtgagaaacggagaaacaaagacaaaaagacgcgcagaccgggagggagagaagcatgaaggcccacagacgctcgggggcagaccaagacgccctggggtccccgaaacagagatgtacagagtcggacacggaaagggagagaccagctcacggttaagaaaggagggagaccagcccaggatcaagaaagggaaagaccagcatgggctcaagaaaagaaagagaccagctcaggctcaggaaaagagagagacccagagaaaaggagcactcgaggctgagacagatctggacagagatacagagacagggaccagcagacccagtactggggagacaagaggtggagacccagagacactgatgcgctaaaatgggttctacagtttcaaggagtggatagaactcaaagattacccaccccagggattcaggagctgctgaaatgagggaaatgtgagtggcagctggggtgagggctttggcaaagccccatataaatgtagcccccctggaaggcaggatagggccaggagctgcttcccatttcagttttccagatagaggcgcttatgaggatgccattttggtcgtttttgtgtgaactgatttttaaaatgtatatctgaacagtttatatattttaaatttacatacaccacacattttggtattcagttttatgaattttaactcatatccaccaacaaactcgggacaaagaatagctccactgcccaaaaatcctcctgctgcctcttggtagtcactccctccccacccataaccccaggaacagctaatctaagtagtccactgctacaattttgccttcacagtgtcatataagtgggatcatacagtatgtggcctcttcagattggctttttcactgaacataattcctttgagaggcattgaagtagtatgtatcaacagttcattccattttattgagaagtagtattctatggtatatagcagtttaaaccttctcccactgagagatattaggatcgttttaagtattttgctattaaaaataaagctgctatgaacattcgtgtacagatttttctgtgaacgtaagttttcacttttctgggataaaagcccaagagtgcagtttctaggtcacacaatgaacacgtgcttattagtgttgtaagaagctgccacactctcatgcagagtagctggaccattttacactcccaccaccaatgaatgtgtgaatccacttcacatttttatcagcatttgtgttttgctattttttattttggccattctgataggtatgtactgatatatcattgtggtttcaatttgcatttcccttaattgctaacaagtttgagcacactttaatgatttttttggcatttgtataccctcttcattaaagtatctgttcgtatcttttgcccattttctaatttttaaaaaaattgctcagttttgaaagctatgttttttttttttttgagacaaggtctcactctgtcactgaggctagagtgcagtggtgccatcatgaatcactgcagccttgaccttccaggctcaagtgatcctcacctcagcctcccgagtagctggaactacaggtgtgcgctaccatacccagctaatttttttttttaagagatggggtctcactataatgctaaggctggtctcagacccccgggctcaagcaatcctcccaccatggcctcccaaagtgctgggattacaggcatgagccaccatgcccagtctttccagtttattttaatggatataactcaggaactgccaaatggaagagatgcacagctaaggtctggtcaggggcactgaaggtgcagtgcatccatgtaccgtctgggtgagccatcctcccagcactcagatgtgttcaccaacccagctctctcaatcgtggggcagagagagggtccataccttctttaaggtgactatccccatcctgaagatatctatgggtcccactggagtcacctcattagcataaactcaggtgtggtcgaaacgggctccttatgaattgcaaaccctattcctattattcacaaaattccaaggcttttagctctgtgccaggaaccagggataaagatcaaatgtaagggccaggcgcggtggctcatgcctgtaatcccagcactctaggaggccagcgggcggatcacgaggtcaacatggtgaaaccctggctctactaaaaatacaaaaattagccaggcatggtggcaggtgcctgtaattgcagctgctcgagaggctgaggcagcttgaaactggaaggcaggggctgcagtgagttgagatcgcaccactgcactccagcctgggcaaaagagcaaaactccatctaaaaaaaaaaagaaaaaagatgaaatgtaggttttattacaccacagatggccaattgttcttgcaccatctggaaaaggctatctttcctgcattgaatagcttttgctccttaaaaaatcagtcaggaatatctttgcaggtctatttccgggttctcgattccgttccactgatctatgtgtctgccaataccacattgggttaccacggctacagagtaacaacatcaggtgcagttattcctcccactttttttttttttttttttttttttgagacagagtcttgctcagttgcccaggctggagcgcagtggcgcgatctcggctcaccgcaagctccacctcccgggttcacgccattctcctgcctcagcctcccgaatagctgggactacaggcgcccgccaccatgcccagctaatttttttttttttttttttttttgtatttttagtagagacagggtttcaccatgttagccaggatggtctcgatctcctgacctcatgatccacccgccttggcctcccaaagtgctgggattacaggcatgagccactgcgcccggccactttttttctttttcaaagttattttaactattccaagtcttgtgctttcccatatactttatcttcttcttttttttttttttttttgagacagagtcttgctctgtcacccaggttggagtgcagtgatgcaatttcagctcactgtaaactctgcctcctgggttcaagtggttcttctgcctcagcctcctgagtagctgggattacaggtatgtgctaccatgcctggctaatttttgtatttttagtagagacggggtttcaccatgttgaccaggctggtctcaaactcttgacctcaggtgattcgcccaccttggcctcccaaagtgctaggattacaggtgtgagccaccgcacccagccttttttttttctttgttttttgagacagaatctcactcctaaccatgctgctaatatttacatggtcctgcaccagtgtgttcatgtaatttcacataacttttttctttaattagggttgagtttcctatataggccttctaagcagccagagatcacacacttaaatgagcacctattagcttccaggcatattatgttttcttttataaataaaagcctcaaaatgcacacatgcatacacacacacacgattactgaccaaaaggtatttcagtataaaagctagagtagaagctccataaggacggtgacttttccctgtttaggcagcttactaaaaaaccccatatactcagccgggcgcagtggttcacgcctgtaatcccagcaatttgggaggccgaggtgggctgctcacgaggtcaggagattgagaccatcctggctaacacggtgaaaccctgtctctaccaagaaaatacaaaaaaattagccgggcatggtggcgggcgcctgtagtcccagctactagggaggctgaggcaggagaatggtgtgaacccgggaggcagagcttgcagagagccaagatcacgcaactgcactccagcctgggcgacagagcaagactccatctcaaaacaaacaaacaaacaaacaaacaaacaaaccatatactcttctgtgctgtttggcttccccccacattatgaactttaaaaatcttgcaataaaataacaattatggctgacacaggctataagaaagaaggcaggtaacaatgattattcagcaaggtaggaaggactacaatggcacacagacttgccattttgtactgcatcggatatgtcaatgttaattgtcatctcagcaacaagattttttccttgagagttgtatttctcctcaaatggactctcactagtcattcaattcctccttctgatattactcttatttcattgattccaagataacagatggtaacatgtacattttatgtgctaataaaaggctgcctgaggcctagcacagtgcctcacacctgtaatctcagcactttgggaggccgaggtgggtggaccacctgaggtcaggagttcaagaccagcctggcaaaacctcgtctctactacaatacagaaattagctgggtgtggtggtgtgcacctctaatctcagctacttgggaggccgaggcagcagaatcgcttgaacctggcaggtggaggctacagtgagccaagatagcaccactgtactccagcctgggtgacacagcgagactctctctaaaaaaaaataaaaaaataaaaaaaggctgccaattaaaccatatcactgattaacctggtttgttttcagatgttaaaatatggcaagatatgtatcacagaataaaggaaatacggtaagtctttaggttctgtgtcacgactaacttccagatataggcattaccttgttttcttgcactttgcttaattatcctatgcagatattgcattttttacaagttgaaggtttgtggcaacctgtgtcaattaagtctattgtcaccatttatcaaacagcatatgctctctgtgtctctgtgtcacattttggtaattctcacaatacttcaaactattgcattattattatctgttatggtgatctgtgatcagtaatttttgttgtaactattgtaattgttctggagtgaaaggaaccacgcctatataagacaatgaactcagcagataaatgttgtgtgtcctgattcctccaccaacctgccattgctcgctggtacgcactctctctcaatctctttcctcaggcctccctattccctgagacaaaacaatattgaacttaggccagttaataaccctacaatggccactaagtgttcaagtgaaaggcagagtcagacctctaacttcaaatcaaaagctagaaatgattaagcttagtaaggaaggcgtgtcaaagacaggccaaaacttagccctcttgtgccaaacagccaaattgtgatggccaagagaaaaacttgagggaaatgaaaagtgtgactccagtgaatatgtgaatgacaagaaactgaaacagccttgtcgccaatagggagaaagctttaatggtctggataggagatcaaactacccaaagagaactaacattctcttaagccaaagcctaatccagagcaaggtcctgactctcttcatttctatgaaggctgtgagaggcgaggaagatgcagaagaaaattctgagccggccaggcacagtggctcatgcctgtaatcccaacactttgggaggccaagcgggatggatcacctgaggtcagcagttcaagaccagcttagccaacatggtgaaaccccacctctactaaaaatacaaaaattagctgggcatggtggcgtgcgcctgtagtcccagctactcaggagtctgaggcaggagaattgcttgaacctgggaggcgaaggttgcagtgagctgagatcgtgccactgcactccagcctgggcaacagagtgaggctgtctcaaaaacaaaacaaaacaaaacaaaacaaaaaaaaagtctgggccgggtgtggtggctcatgcctgtaataccagcactttgggaggcagagatgggcagatcacctgaggtcaggagtttgagaacagcttggtcaacgtggcgaaaccccatctctgctaaaaatacaaaaaaaattagccaggcatggtggcaagtgcctgtaatccctgctactcaagaggctgaggcatgagaattgcttgaacccaggtggcagaggttggcagtgagccgagatcatgccactgcacactagcctaggcaaaagagtgagactccatctcaataaaataaaataaaataaaataaaataaaataaaataaaataaaaaagtctgaagctagcagaggttggttcatgaagtttaagtcatctccgtaacataaaagtgcaaggtgaagcagcaagtgctaatgcagaagctgcagcaagttctccagatttagctaagatcactgaggaaggtcgctacagtagacaacagtttaaatgtaaagaaaacagccttctgttggaagaaatgccaggtagtgttttcacaactagaaagaagtcagtgcctagcttcaaagctttaaagaacaggccgactcttgttaagggctaatgcaactggtgactttaagttgaaaccaaagctcatttaccattctgaaaaccctagggccttaagatttaagttaaatctactctgagtgctgtctataaatgtaaacaaagcctggatgacagtacgtgtttacagtatggtgtactgaatattttaaacccactgttgagagacttcctcctgagaaaaaaagattcaaattatggctgctcactgacaagagctctgatgaagacatagaaggaaattaatgttgttctcgcaactgccaacacaacgtgtattctgcagcccatggaccaaggagtaataattttgcctttccagtcttcttatttaagaatgcagtttagctggcccaggcgcagtggcctgtaatcccagcactttgggaggctgagacaggtggatcacgaggtcaggagatcgagaccatcctggctaacacagtgaaacccagtctctactaaaaatacaaaaaattagccgggcgtggtggcgggtgcctgtagtcccagctactcgggaggctgaggcaggagaatggcatgaacccggaaggcagagcttgcagtgagcagagatcgcaccactgcactccagcctgggcaacagagtgagactccgtctcaaaaaaataaaaaataaaaaagaagaatgcagtttgcagctatgcgtggtggctcatgcctgtattcccagcactttgggaggttgaagcaggtggattacttgagcttaggagtttaagactagcctggccaacatggtgaaaccctatctctactaaaaataaaaaattagccggccatagtggtacatgcctgtagtcccagctactcaagaggctgaggcatcaggatcgcctgaacccaggtggcagaggctgcagtgagctgagatcgcgccactgcactctagccgaggcaacagagtgagaatccttatcaaaaaagaaaaaaaaaggtatgtattttgtaaggctatagctgccatagatagtaatgattccttggatggatccagggaaagtaaattaaaaaccttctggaaatgattcactatgctagatgccattaagagcattctaggccaggcacaatggctcacacctgtaatactagcactttgtcaggatgaggcaagaggatcacttcggcacaggagttcaagaccagcttgagcaatatggtgagatgccgtctctacaaaacataaaaaaaattagccaggcgtggtggtgcatgctggtagttccagctatgtaggaggctaaggtgagaggacaacttgagcctagaggtcgaggctgcagcgagccatggttgcagcactgcactccaacctgggcaacagaatgagaccatgtctcaaaagaaaaaaagacatctggctgggcgcggtggctcacgcctgtaatcccagcactttgggaggccgaggcgggcggatcacgaggtcaggagatcgagaccatcccggctaaaacggtgaaaccccgtctctactaaaaatacaaaaaaaattagccgggcgtagtggcgggcgcctgtagtcccagctacttgggaggctgaggcaggagaatggcgtgaacccgggaggcggagcttgcagtgagccgagatcccgccactgcactccagcctgggcgacagagcgagactccgtctcaaaaaaaaaaaaaaaaaaaaaaaaagaaagaaagaaaaaaagacatctgttttttttgtttttttgtttttttttgaaatggagcctccttctgtttcccaggctgcagtgcagtggctcgatctctgctcactgcaacctctgcctcccagcttcaggcaattctcctgcctcagtctcctgagtagctgggattacaggtgtgcaccatcacgcctggctaatttttttttgtatttttagtagagatgaggtttcagcatgttggtcaggcttgtctcgaaatcctgacctcgtgatctgcccaccttggcctcccaaagtgctgggattacaggcgtgagccaccgtgcctggccaagacatctgttcttgaataatgagactggaaagtcaaaattactcctgatctatgatgggctgcagaatacatgttgtgttagcaggtgtgagaacaacattcatctccctgtacatcttcatcacagctcttgtcaacaagcagccatattttgaaaggaatctttattctgaggaagtctcaacagtgggtttaaaatattcagcacaggccgggcatggtggctcatgcctgtaatctcatcacttttgggaggccaaggtgggcagatcacttcaggtcaggagttcaagaccagcctgaccaacatggtgaaaccctatctctactaaaaaaaatacaaaacaattagtgtgatggtgggtacctgtaatcccagctacttgctcaggagtttgaggaaggagaatcgcttgaacccaagaggcagaggctgcagggagctgagatcacactactgcactgcagcctgggtgacaagagtgaaactctgtctcaaaaataaaataaaatattgagtgcaccatgcggtaaacacatgtgctgtcatccaggattttttcttccatttatagatggaaaaacatatttgttactttcaaacaacataaactcttcaacatgaagtctctgacaaagaggaggcaaagaaaatcagatcagtcactgccacagatgctcactgaatccccataggtctcagtccaatgtgtcaactctggtttctagcgagagcacagatacttgggaaaactttcccacactagacacactggcacaaggtcgcctgagcatgtaccttcttgtgcttggtcagacaggagctgtccctgaaggctttgccacaccgattacactcgtagggcttctcaccagtatgagtcctctggtgccagatgaggcccgcgatgttcctgaaaagtttgacactggttacagccacagaccttctcaccagtatgaatcctcttgtgcctgatgaggtacataatctcagtgaaagattttttcacattgtttaactcatgagatttctttccagaatgatttttttgatgcaaaagagctgactgttgtggttggagaatttttcacactccatacacatatagggtctctttccaatgtgaattctcccatgtttaataagttatgtgtgatcaatgaaggcctttctacacccagtacatacatagggctcccctcacatgtgaattctcagatggacaataaggttggagacatcagaaaaggatttttcacattcattacattcgaatagtttttccacagtatgacttctgaaatgcaaaacaagggaagagtggcagctgaaggtcttcccataccaattcctttcacagggcttctttcctatgtgggttttctcatgcttggtaaaggtggagccagcactgaaggctttcccacttcttgcatttataggatttctctcctgtgtggattttttgatgtacaatcaggttgtaattcttagagagggattttccacagtcattacaggtataagggctctctccagtatgagtcctctggtgactgatgaaatgagatttcggtctaacggacagtccacattcactgtcattgtattcatttccagagatacttccattgtgttcataaggacatgtgtccctatcaaacacctcctcgtgtccttctcctttgtgttgttcctttctctggcaattacatgttgttcactaaggtgtgtagaaaggctgaaggagttaccaccttcgttacattttgaaggctcatctccttgttagatcttcatcaaggtggctaggttgtccaccctggctgatggctgctctacagtcatcattttcctcaagaatttgaccgttagagcctttctgacaattatgtatgtaactaaaatgtttaacctttgagtcatgttcacagaaacctgttgtttgaggacctctttgacatgaagctaggactgagcagatgaccacaatggtcatggtgaccacagcccctcatagatgctctgggtccttgtgtgtggatgctgtttgcctcaaatgcacctctggatttctatggagcatttctacctggtcctcacattcccagacctctcctaatgcagataaaacaggaatcatccctgatgaacctttttattttcaccaaattggatagttccttcccaacaccatcccaagttgatgcttccatttgacttttgtttcccaggctggaaaggaaaaggggaaaatttttgaatccttagagaaaaaattgctagagttagaatggtaatgtgtaaacattaaaatcagccaggccagtatctattatatctgatgctgtgcccattctgtgacacagcaattccacttgcaagggtacaatcaaaagaaatgtgtatgtatgttcatagaaacactctttctaatagcccgagactagacactatccaaatgtcaccaactgggaaatggaaaacttgtggtttacttacatgatgaaataccacacattaacaaaagtgaataaactaagagtacacaaaaatatgggtacatttctcaggcatattatttgaaagaggaagtatatatactgaaagtgcacagtatatttactttgtgaaaacttctagttttacatttatgtattttttagcatgtatacttccaggaaaagcttttacaaaatcatatgtgcacacacacacacatcctaccaaataaattagccagatttttaaaaaattaacatagattttttttcagttatacacctgcatggtaggaagagaatataaagatggatgaaggatagtgaataaatatcactttagatattatgatttttaaaaagggacaggttctggttatgttgcccagcctgaactcaatctcctaggctcctcccacctcagcttcctgagtagctgagaccacaggtgcatgttaccactcacagaaaattttttaaaaattattttttgtagagacaagtctcactatgttgcccaggctggtctcaaactccttgcctcaagtgctcctccggcttcagccttccaaagttctgcaattacaggtgtgagccaccatgcccatcctctagctgtatttctgaagtcccttcactgagaagaacttgatctccaactgtccccaagatgcttcttcagtgtctcctgatgctttgcttttctgtctatccaaacagaaatcatcttccactctcctctccactcccattaccattcttccttcacctgtcccacccactcggcccctctgaatccagacatgcatactagactgtccaggcctcccaacccactcggcccctctgaatccagacatgcatactggactgtctaggccacccaacccttagagatctgcccatcattacaccctgaagagaccaaaagctgtggcatggcccatgctgcttctccctgagtcttcccaatcccagtaaacagccatcccattttctcagtggaagaggccagaaacctgctccactgggatggaacatactccattctccactctcccttttctcaaaagtcacacctaagctatcagctttgactttcaaatacacacagtatcctaccaatttacacttcctccaccactgtggtccaagttataatcacccttttattataaattgaagcataatttaaacagaataaattcaaagtggatgactcactgagtctttagatgtattttcatgagtgttcatatgtgtatgcacactccatgtgtgtatgacaatccatgatataaaacatacccatttttaggccaggcacggtggctcacgcctgtaatcccagcactttgggaggctgaggcaggtggatcacgaggtcaggagatggagaccatcctggctaacacagtgaaaccccatctctactaaaaatacaaaatatgagccaggcgtggtggcgggcgcctgtagtcccagctactcgggaggctgaggcaggagaatggcgtgaacccgggaggcggagcttgcagtgagctgagatcgcgccactgcactccagcctgggcgacagagcaagactccgtctcaaaaaaaaaaaattcccattttctggaggtaatcgctgctctgacctccattactacagactgctttgattggccctgaactccatgtgagcaggattgcaccatccacatgctcttgtcttggacttgtcattcaacagtagctctcatggttgtttgcatggttaaaactgaaccccccgaaaaaaattttttttaagacagggtctcattctgctaccctggcaggaatgcggtggtgtgatcacagctcacagtggcctccaaatcctgggctcaattaatcctctgcctcagtctccaaagtagctaggactacaggtatgcaccaccatgtgcagctacttataaagttgtttttttgttttttttttttaaatagagacatggtctcactatgttgtccaggctggtcatcaacccctggcctcaagcaatcctcccaccttgacctcccaaagtcctgggattactggcatgagccactatgcccagcatgtaccaaacaattaaagaagaattaataccaattcctctcagactcttccaaaacaggagggaacacttcctaactcatcctatgaggctagcattaccttgataccaaagccaggcaagcacactacaagaaacctagaaaccatatcccttaaatgttgaattcatcagtgtattacaaggattacacaccacgagcaagtaggactgttcatggaatgcaaggatatttcaacatgcgaaaattagttaatgtaagacatcacaataacaggataaagaaaaaaacacgaccatctcaaatgatgcattaaaagcattggacaaaattccaaacccgacccctgcctttctttactttttattttattttacttttttgtttttgagaccaggtcttactctgtgacccaggctggagtgcagtggtgcaatcatggctccctgaagcctcgactgccctggggtaaggtgatcctcccacctcagtctccccatagctgggactacatgcacaaggcaagattcccagtaatttttgtatttcttgcagagatggggtttttgccactttgcctagtctggtctcaaattcctgtgctcaagcgatacgcccatttcggcctcccaaaatgtcccgattacaggtgtgagccattgcgtctagccccaacaccctggcatgattaaaaaacatactcaaggctgggcgtggtggctcacgcctgtaatctcagcactttgggaggccgaggtgggcgtatcacgaggtcaggagatcgagatcatcctggctaacacagtgaaaccccgtctccaccaaaaatacaaaaaaattagctgggcgtgctggcaggcacctgtagtcccagctactcgggaagctgaggcaggagaatggcgtgaacccaggaggcggagattgcagtgagccgagatcacaccactgcactccagcctgggcgacagagcaagactgtctcaaaaaaaagaaaaaaaagtttaggccaagctcagctgacgcctgtaatcccagcacttgaggaggccgaggggggcagatcacctgaggtctggagtttgagactagcctggccaacatggtgaaaccccttctctactaaaaacacaaaaaattagccaggcatggtggcgggcaactgtaatcccagctactcgggaggctgaagcaggggaatcacttgaacctgggaggcagaaggtgcagtgaaccaaaatcacaccactgcactctagcctgggcgataaagcaaggctccgtttcaaaaaaaaaaaaaaaaaaagaatttaaaggggacaggtcaggatattgagaaacacaattttcacataaacaaaagggtcaagggccaggcgcagtggctcacgtctgtaattccaacactttgggaggccgaggcaggcagatcacgaggtcaggagatcgagaccatcctggctaacacggtgaaaccccatctctactcaaaatgcaaaaaaattagccaggtgtggtggcgggcacctgtagtcccagctactcgggaggctgaggcacgagaatggcgtgaacccgggaggcggagcttgcagtgagccgagatcacgccactgcactcaagcctgggtgacaaagcaagactctgtctccaaaaaaaaaaaggcggggcagaagaaaaatgtggggaatctgcattaggataacacagacaaaatggggcaggggaacaatcagatacgcatttgtgtctgggatgccggggtgactgcacttgtaaagataagctatcaatttgcattgccatggtgaagttttcacaacagctcaccaggaatttctttgtgggcaaaatatgggggaggcatgtagcatttcatcttgtagccaccttatttaggaacaggggaggcaggtttgcttgacccagtttccagcttgacttttctctttgactaaatgagtttggagtcccaaaattcaatttcttttcacaaccgtggtaagacttggctcaaaaataataccataatggctggacgcagtggctcacgactataatcccaggactttggaaggctgaggtgggtggatcacttgaggtcaggagttcgagaccagcctagggaacatggtgaaaccccatctctactaaaaatacaaaattagccaggtgtggtggcatgcgcctgaaatcccagctactcgggaggctgaggcaggacaatcacttgaacccaggaggcagaggttgccataagccaagatcgtgccactgtagtccagcctgggcaacagagagactccagctcaaaaaataataaggctgggcgtggtggctcgcgcctgtaatcccaacactaagggaggccaaggtgggcagatcacaaggtcaggagttcaagaccagcctggccaacatagtgaaaccccatctgtattaaaaatacaaaaattagcacggcatggtggcacgtgcctatagtcccagctacttgggaggctgaggcaggagaatcacttgaacctgggaggtagaggttgtggtgagccaagatcatgccattgtactccagcctgggcaacaggccgagactctgtctcaaaaaaaagatgataataataatgtcataatataattaggaattgggaaattttgaaaaggatgggttatcacatgataacaggaaattattgctcattttcttaggtgtgatacagtattatggttatgcaaaagaatgtctttattcttagaatgtatgtgccaacatatttatgagtaaagtgtcatacttgtaataaatatatatacatgtagacatacatatacttaaacacatgcacacataatacatatacgcacagataaatatacaaatgtacattatataaatatatacacaatatacacatacatatatacatacaaaaatacatgtatacacacatatgcccccaaatatataaacaagtatgtatatatacacgtatgcacaaatatacattaataaatatatagtgtgttatatattacaggcacataaaacaaatatggcaaaatattaattggtgaatctcggagtgggtgatgggcattcatgatactcttttttctcaacttttctgttagagtatttcagaaacttgtcaaaatataaagtaggcaggggaaatataaatgcctcctggagagatattccaggatcatcattcattaacaccttggtgaggtgaacttataacaggtttctcaaaaggcattcaagagacggttgtaagtgttcaagggggaaaaatatgatgctagcgctagaagctgttaaaaaacaactatggagttaccaactgggaaaatgctagtttgtaaggccctttccaggcaataggttttgttgcaggacactaaaggaaggccagaagtgtcagccactaagaactggagtcagggcaaggcagagctatccaaagcactcacaggttcctggggcaaaccctggaatcaactggccctctagctgctcccagtggttggcagctgatccaagttcaatcctatttaatctgtttgtgagctaaatattgtttctgagaagacaagtaagtgaaaatagggcaaatataattctattctggattcaacagggagcttactatttaaataaaacttcaaattccatttaaatattttatattaaagatatcactgcagaattaatgcatgttcattgcagaaaatctggaaaacataaataagtacaaagacaataaaaataatctataatctcactgttgagccttgggtgcatttacttcctgttttcttcacagagaatcattttgaaacaggtggagtcaacgtgtgtatataacttgggtccttttttgtttttcctagttaacattatattacgggtagttcccacaacattaacatgtctttgttagtataagaaatgccacagcctctctgaagaacaattcagaagaactaggttgaaataaaaaattctaaatgccaagagatgtggtggatccacactggcatcctttttacaatgacaaattaaaattcaaaagtagtatcagaggatctcacatttagcaagcgtggtttcatcaaacttttgttacagttagtatgcatgcaagtcatcatgtacatgtttctctcaatgcttgtgtgaaaattttgaaaacctacaggctagaaaaacccttacaaggatacacattcaacttgcctccctaaagcactggtggaaacgctgaaaacctggaaacttccaagatgttcatcaacaggaaaggcaagacaaaaaaaactgtggcattttcacaaggtagaatagtatagagcagtgaaggccggtgtactgaaagcttcacctagtacaaggttggggagagaagaaggttgcaaagtcttgtagcacataaagcatgccaatttcaaacacacgcacgcatgcacacacaaacaccccatactccatattgcccgaggcactggatatcacaaaggaaaaaactctaaaaaaaacccccaaaaaacggcctgggcacactagataaatgtgcagtgaattcatcacacaccccctctgtgatcttaagtctgtgggaaaagggccagcttcctgtggtcacaaggatggctctttttctttcattctgcaaacatttactgaacacgtactgtatgccaggacctgttctaggtatcaataattcagcagtggatcagacagatgaagacctccacctcacagagtaggcattctggtatgggaataggcaaagaactgcagaatctgtcactatcaaacgctctgcaaactgaggaagcacatacctgcaatccagtttctgagttacagctcctttcccaaaccgtcccaatctctatccactgcccacaactcaaaagccaagcaacctcagagaatgaactgccgaaggaagaagctagggcacggaatttcacctgatgcaagctccatcatcatcacctgcaacccagcagcaaacagtccttagcctagcagccccagtcctagggcatgtgaggattctgcctgttactgagtaaggagagtgtttagaggacagatgtgacctgacaggcttccactgaatcgtgaggaggccagaggcacgggagcaaggagatgcccgtaccagagagtagaggtgtggtgatgtggctaaattctggaaatatcttttttacttctatttttttgagacagagtctcgctctgtcagtgctggagtgcagtggcatgatcttggctcaccgcaacttccgcctcccaggttcaagcgatcctcctgcctcagcctcccgagcagctgggattaaaagcgcgtgctttaggggacatgtgagatcctctgacactacttttgaattttaatttatgtcattgtaaaacgcccagctaactgaattctggaaatatcttaaaggttaagccatgggattttggacagagacgatgtggggattggggaaaagagaaatatccaggtggacaaagaggattgtgggtggagggagtcaccacttggagagactagaaagactgagtttgggggagagtagatgctcagctgaggatcccaaagtctgagaggcctgtccctgggggtcagcattcgggcatcagaggtttgtggagagggcagcccagtatacaaccgcagggaagggaggaagggcaagtcagtggagtcagaacccagcagggatgggaggaagcctggctgggaatgttcacagtgggtaggaaggggaaggaacacacaaccctaaaggggcagaggaggaagccatctcttgggataaaggagaggaagaacagggttgttaggaggagtaggatgaaaagtggggaaagcgtccttgggagtaagacacgggaagcagaataggttgttcaagcccaaatcttgtgaggagaggcagaagggaggggcgtccgcacctgtgcaggaagagaggaggggtccataccctgggaaggtgagaaaaggccatctgtgcccgcaggaaaaaaaaaaaaagagaatattggggaggctgaggttaagggacaggcgaaaaaaaaaaagggatccgccccagtgggagggtagaggaagagaaatgagcccccgccccaaagggggcctgcgcccactaggagagagagttagagggtccgtgctccacagggcgaagggagaggaaattcggagttggcaccgcactggggagaagggtatgggggcccacgcccaacgaagaggagggagtaggggtccgcgccccaccacgaaaggagagtagagggctcgcgccctgcggggagaggcgttagggggtccgcgcccggcgaggagatgcgcgtaccagccccgcacgccaaggggagaagacacgcgggacggtccgcgcctggcggagagagttcctcacgcccgccccgccgggaaccacaagccagcgcccctaacaagcccctgcccagagcagggctgccgcgtaccctcacagacagaaagagcgaccacgcagccaccgcccagccccagccgctctggagtccttgaccccaccctcactaggccttggctccgcgaccggtgggcgggaacggaggaaacagacccgagaggccgcgagaggacggaactcacttcccgccgccgtagcgtcctcgtcagctcgccctccgactctccgcatgggcgcgcagagttcccggatgcgatattccggtgacaccggacgctgggggcggggcctagtgcgacgagggcggggccggggccggcccggggcggggccgtggccgcagctgcctggcagccagaacctgggagcgctcgcagtgctgcctttcggggttctttgtccttcgcttctgctggtaggtgaggtttaacagacggaaagacgccgggagcgcacgtgggctgccttgagccgctgcggacgagcaccttgtctctcaggttgaccagccgtatatccgcttgcgagcctgcaccaccctgggcgcgcgtggtctcggcagaatctcgttcacacgggtcccactcgtaggctgctgtgtctccttcctctcacggcgtcggggactggggcctggagtcactcctctacaggggtgtggaacgcgccaatggacgctgacaccttcatgcggtcgtttaacgctccgtgcacaataaccattttactcagttgtgtgatgctccatcgaaaataacccatttacacggttgtataagaccccacgacacgataacccctctacgcagttatgtaagactccatggcacaataaccccttcatgcggttgtgtaactctccatggcacaaaaacccattgccatgcataaggttccgtgccaaaataaccactttacgccattgcataacactctatggcacaataaccactttacaaggctgtgtaatactctacgccacaataaccctttcatgtggttgtgtaatcttccatggtgcaataaccacttcacttggttgtgtaatcctccagggcacaataatcattttatgtgatcgtataaaatgctccactgtgaatacaccatttgctcattttccttcctgtcagtggatatttgggctgtttccagttgggagttactacaaaggaacctgctgtgaacattgtgtgtgcatcttttgataagcaggtttgtatttctgttgggtgaatgcctaggactgcagctgtctcttcatgggtgcacctgttcaggttaggagataacactagtttacagtgccccctgcagtggtgtataagattcccagttgctccccattcttgtcaacacttggtactatctgttgttttcatttttgccattagtgtgatgtgaagtagcatctcattgtggtttctctgattagtagtaaagttgggcacactttcatgcacttattggccatttggacttttccttgtttatgagggggctggttcaagtcatttgccaacttttctattaagttgcattcttattgagatgctgagttctttatatatttggaggccaatcttttgttggctctacaatggtcttctcccactctgtcacttgccctttcacttgcataatattgctttctgatgaacataagttggttttttggtttttttttttttttttttgagatggagtcttgttctgttgcccaggctggagtgcagtggtacgatcttggctcactgcaacctctgccttccaggttcaagcagttctcctgcctcagacccccaagcaattgggattacaggtgcatgacatcatgcccggttaatttttatatttttagtagagatgggttttgccatgttggtcaggctggtctcaaactcctgacctcaaatgatccatccacctcggcctcccaaagtgctgggattacaggtgtgaggcactgtgcccagcccctttccagttttaaagccaggaacagggagtagattcctcacacttcagctctctactcgctccttcctcagcatctgactccagcccacaatctctgcttttaagggcatgtgtgctagattgggcccatccagataatccaggataccttcttctctatctcatgtcccactcatttcagccaaacttgcaatggcccaggctaccccagaatccatctggaactcacctagtccacatctcatattctctttggtcaggagtttctatcctctgtgattgaattacagtagcctctcctgattggcagtttcacttctccacctttgttacccgaggtcaactgtggtctgaaaatattaaatggaaaatccagaaataaacaattcataagtttcacattgcacactgctctgagtagcatgattaaatcccatgctgtaccacaccatcccgcccaggatgggaaccaggcatttgtctagtgtgtccacactgtataccccctattagttacttttagaagccaccttggttattaaattaaccatcatagtatcacagtacttgtgttcaagtaacctttactttaaaaaatattttataaattaaaccttatcacaggttaagtataagaaaaaacatagtatacagttagccctccatatgcgtgggttccacatttgtagattcaaccaactttggattgaaagtatttgaaaaaacactgcatctgtagtgagcgtgtgcagacttttttcctcatcattacctcctaaacaatacagtataaaaattacaaagtatttacgttgtattagggaacataagtaatctaaacattactatttttttttttttttgagatggagtctcactctgtctcccaggctggagtgcagtggcatgatcttggctcactgcagactccacttcccaggttcaagtgattctcctgccttagcctctctagtagctgggattacaggtgcatgctaccacacccagctaatttttgtatttttagtagagacggggttttgccacgttggccaggctggtcttgaactcctgacctcagctgatctgcccgccttggcctcccaaagtactgggattacgggcttgagccactgtgcccagcctagacattaaagtacactggaagatgtgtgtagattatatgtaaatacacaccatcttatatgagggacttgagcatcatctgatttggtgtctgagggcagttttggaatcaatctcccacagatatagagggacaactgtatatacggtttggtgtcataagaggttttaggcatccaccatggtactggaatgtatccccctggatttggtagggaggactactacatgttcattacagcagtgattcctgctaatttgagaaaagcttatttattattatttcatttcattttgtagagatagggtctctgtctgttgcccaggctggtcccaaactcctggactcaagtgatcctcccacctcagcctcccaaagtcctgggattacaagtgtgagccatagtgcccagcctaagaaaattttttcaataaagatcaagaggaatacaattcacacaaaaccatggggctcataccaatatcatagttgacaccacttcttcagaatgcttactctctggccacaactggtcaggggatgagtccatcccagaatctgaaaggtagaaccaagaggtagagatgctgctgacactaactgcaacacctgcatattttacttgagagctgcagacaccaaagtgaagtgcccagcctgggcattcctgacagtccactagggatttgtgtcttatgatacacacatttctacagagacataaatctgtaacttataactgtacacatcctgggaatgtaagacttttccccaataatggggttcattcttttgaaagtatgaacaagaaatgtatacacttaagccttggcacagctcacacctgggctggataactctgctgtgggggccattatgagccttgaaggatgtttagcagcagccccagcctccacctgccagatgccacccttcatcatgaccacccagatgtctccatatgtcccctgggggcaaaattgcccctggatgagaaccactgctcacagtgaatagatccacatgttcaagtgcgcccacaccatggaatattacacagcactgaggagaaaccacagctgcctgcagcaacatggatgagtctaacctacacaatgttgtgcaacaggcagacatctaattccattcatacaaacacatggtgaggcaggctttattccagaagctactacagaggggcttgggaggccagactcaactccagcttggacaagaacaagtgagggcttaaagccgagaagcagcagggtgtctggaggatgaaaaattactaagtgcaaacctcagagataaggggtgaattcttgccagaccaactcaagagaagttttcctaaaggcaggcccagggaagaagacattgaaggtgggggacaaggaatttgatcagatatcaaagtggagtggggagtgctacacacttttaaacaaccaggtctcatgaaaactcactcactatcatgaaaacagcaaaaggggaaatccacccccatgatacaatcacctcccaccaggtctgtcccccaacactgggaattacaatttgacatgagattttggcagaaacacagagctaacccatatcattctatccctgtcccacccctaaatctcatattcttctcatactgcaaaatgcaatcatgccttcccaacagtcccccaaagtcttaactcattccagcattaactcaaaagtgcaagtccaaagactcatctgagacaaggcaagtccctttcacctatgagcccataaaatcaaaagcaagtgagttacttccaaggtacaatggagggtacaggcattgggtaaattcccctattccaaaagggagaacttggtcaaaacaaaggggctacaggtcccatgcaagtctgaataccagcagggcagtcattaaatgtttaagctccaaaataatcttctttgactccatttctcacatccaggtcacactgatgcaagggctgggctcccaaggccttgggcactccactcctgtggcaatgcagggtacagcccctgtggctgctttcacaggctggtattgagtgcttgtggcttttccaggcacacggtgcaagctaacggtggacctaccattctggactctggaggatgatgaccctcttctcacagctccactaggcagtgcctgagtggggactctgtgtgggggttccaaccccacatttcccccatccccctgccttagcagaggttctccacgagggctccacccatgcagcagacttctgcctggacgtccaggtgttcccatacatcctctgaaatctaggcagaggctcccaaacttcaactctcgccttctgtgcacccacaggtccaataccacatgtaagctgccaaggcttgggacttgcaccctctgaagcaatagaccaagctgtacattggcctcctttagccacagttagaactgacgcagctgggatgcaggatgccaagtcttgaggatgcacagagcactggggccctggaccctggcccacaaaaccatttttctctcctaggcctccaggcttgtgatgggaggggcggctgagaaggtctctgaaatgccctgcaggcattttgctcattatcttgcctattaactttcagctcttctttacttatgtacatttctgcagcctttgattcctgccagaaaatgggcagcaaattttcaaaactttcatgctttgcttccagtttaaatgtaagttatagttttaggtcatttctttgattatgcaattgagtgcagactttaagaagcagccaggcgacctctccaacactgctgcttagaaatttattctgccagatactctaaataatctttctcaagctcaagttgtgtctgtcacagatctctagagcaggagcacaatgctgccagtctttttgctaaagcacagcgagagtgacctttattccagttaccagtaagttcctcatctctatctgagaccaccacagcccagacttcactgtccatattattagcattttggtcacaaccatttaagtctctaggaagttccacactttccctcaacttcctgtcttcttcggatcccttcaaactgttccaacatctgcacattacccagttccaaagtagcttcaggaatctttatagcagtgccccactcctgttaccaactttctatactagtccattctcacactgctgtgaggaactacctaagattcggtaatttatgaagaaaagaggtttaattgacttacgattccacaggctgtacatgaagcatggctgggaggcctcaggaaacttacagtcatggcagaaggtgaagaagtaagcatgtcttaccatggcagagcaggaaagagggtgaatgaagaaggaagtgctacacacttttaaacaagcaggtctcatgtgaactatcatgagaacagcaaggaggaaatctgcccccatgatccattcatctcccaccaggtccctcccctaacaagagaattacaatttgacatgagacttgggtggggacacagagccaaaccatatcagattctgttttgagacagggtcttgccccattatccagcccacagtgcagtggtgtgatcacggctcactgtagcctcaaactcccaggcttaagagattcttctgccttcttcctgactctccctcctgataagctggaactaaaggcacatgccatcacacctggctaatttttacattactatttgcagagatgggggtcttgctatgttgcccaggctggtcttaaatgcctaggctcaagcaatcctcctgcctcagcctcctgaagtggtgaaattacaggtgtgagctactatgcacatccaaacatcttgctcaaactggatcctatagggaaagggagaagcccaaggtcagagggctcaggggatcctgatttaagttgggtcaaggagagtctgcagtgcacttttctgtatgtgagctatactcaaacgcaactctctggagaagacaagtcagcctggtcccctttcatccatcaccacaccctgggacacagcaccatcccatcctgactccagagggttcaacaagggtccccgctagtcctccatgcccctgcacctctcaccatgagatcaccatatcccaatgtgtgtgggggagctttacttctctaaatgctctttcagggccactcttcccttcttcactccgtgcctccattacctatctactcattcctctctcaggactggctgcccacccttcccatgacacagctatcagaggcataccaaggttggctgcctcatgggagacagcaagtgccatggaggccacagctgatgccagacaaaagagaacacacacagagaaggaggcatggctgcttgaagctccccacgagctggcctgagggtccggacctcagaataccagcaccatggagacaccaggtcacacacacatgaaccttgatccagctaatacaatgggcctggctgaccccagtcctggactgactcatcactaatcttcactatcgtcacacctgtcccttctcccaggagaggaaattgtctagaggcaaaatcccaaggggatccactcatggggcttcaaggctgtgtcatccaccttgactggctttcactcggccagtactgcactgcctcggaagggccactccaaagtcatcccaaattttctacaggcttcctgttctccattctctgggactcactctctcttctacactgacaaccccttataacccaagtcccaaagaaggaagttattctcatgccctgggctttgggatgctgattccagagacgctactgcccaatgcccctccatccacacttacagcttccctgttgccctgatccagtccctactactaaaggtccaaagaaaccccaaattaacctccttttggcttcactttttaatttattaccaaattattatgccaacaagtatctgtaacagagaaaaaaatatgatacaaaattccagtccccaaagaaaaccacattttatttctccatcatccactttcaacatacatccatatgtgcacatatttttacatggctggaataatagtaaatcttctatttgatgcccctttttgccatattataaacattttcaacatggcaataaaacctttataatggttcacagtggctgaattagaagcatcctaaatgaacaaccatggaggtagtggtggggtgataacataaacataacaactcagtatttttgcttcaacaactaaagcaacaaaccacatctgttagaagcagccctttccatcttagcacaagcttgtttcagtctttttttttgaaatggagtctcgctctgtcacccaggctggagtgcagtggtgcgatcttagctcactgcaacctccacctcccaggttcaagcaattctcctgcctcagcttcccaagtagctgggattacaggcacacactactatgcccagataatttcctgtatttttggtagagatggggtttcaccatgctggccaggctggtcttgaactcctaaccttgtgatctggccgcctcggcctcccaaagtgctaggattacaggcgtgagccaccacatctggcctgcttgtttcagtcttaagaggaacgacttcattgttcattcacaggtaatttattcacctagtttgccctcctgcaacgagtcctcagcattattgcaggagtataatgcagacatacattcaaacaggaaaatctcacacattctgtggtgtgtgcagtacagcactgtgtggactctctcattgtacacctttgttgttacagaaaacacagtaagagcccctgccaaagcctctctttctgattacacttaaaaaaggttgattcaggccaggcagtgtctcatgcctgtaatcccaacactttgggaggctgaggtgggcggatcatgaggtcaggagttcaagaccagcctggccaacacagtgaaaccctgtctctactaaaaatagaaaaaattagccaggcatggtggcaggcacctgtaatcctagctactttggaggctgaggcaggagaactgcttgaacctgggaggcagaggttgctgtgagtggagatcatgccactgcacagtgagactctgtccgaaaaaaaaaaaaaagttgattcagtgtttgcttacgtacaaggtggaaactccctactacagggctcttcattccaatcatgttctgaatgcattcacaggttctctctgtggtgtcacccccatgtttgcacatttcattccagtgtgtgtgttgtcatgtctggtacagactgaatcatccccaaagacttttctgccctcatcctaagttgtctctggagttccccaatgagcagacttaacagtgtggctcagcaatgtctcacattcatcaattcactggatagcttaaaggattcttttctactgaccagagaggagtcagatctaagacacgcctcctaaacacaggagtgagagtgaactggaagactcatgtggcccccaaccattatgtttccatgggttgctctcccaggtgtgctctttgatgtcgaacaagggatgagctcttttggaacatttttccacactgaggacaccggctgggaccctccctgctatggagtctctgatgtactgccaggtgagagttctgcttgaaggacttcccacattctggacactgatatggggtctccttagtgtgaattctctggtgcttggtcagacaggagctgtccctgaaggctttgccacactgattacactcatagggcttctcaccagtatgagtcctctggtgcctaatgaggccagcgatattcctgaaaagtttctgacactggttgcagccatagggcttctcgccagtatgaatcctctgatgcctgatgaggtacgcactctcgatgaaagtcttgccacattctttacattcatagggtttctccccagaatggatcttttgatgcacaatgaggtgagagtttctgttgaaggatttcccgcactctgcacactcaaagggcttttctccagtgtgagtcctctcatgctgggtgaggtacgagccgtcccggaaagcctttccacatttgctacactcatagggcttctcaccggtgtggattctgagatgcactgtaaggtgggagatgtcagtgaagggtttcccacattcgttacatctatatggtttttcccctgtatgagttctttggtgcaaaattaaggatgaatttcggttgaaggtttttccacactctaggcattcataaggtttctcgcctgtgtgaattctctggtgctgtgtcagagctgagccatcactgaaagctttcccacatttactgcattcatagggcttctctcctgtgtggattctttgatgcacaatcaggttgtagttcttggagaaggactttccacactcattacaagtataaggcttctctccggtgtgagttcggtgatgcaaaacaagagaagagttccgtttgaagcatttgccacattcagtacatctatattgtttctctccagggagatttctctggttttcattaagcgatgagctcagagtaaagatgttctcaaaattcttaccttcatacgatttcttgcctcttttcattattttctgatgaccaagagaggtaaaatgattaaaagacttaacactttcagggtatttgtagggcttctctctcactggatttcttccatgaataacttccatggaatggttgaagccttttccacaggcatcactgtcaccagttctcttatctgcataacttttaggatagctgggtaaggcggggtcacaatccagaccactaacatttgagtcaggtgcatggaaaccatttgttgccagaactctctgagacggtggaaggtctgagcttgcaatcaaatgctccccaaaaccaggatattcacaaattgcttcctgagtccctggtttctccagagttaaagctgattgcctcaagtgtccctcctggttctcacagtcccaaccatcacctaaactggacaagcagggaacttcccttgtgaatctttccacttctacatcacagggtacttctctctcaggaaaattccgagtcgtcattttcaatctcatatcccaaactgcaaaaagaagaaaaatgcagacttaggtatatgaagctttatctgtaagagaaacagacaatgatgatgggctaggtgtaaagatgtgtatttttttacttgttttctcttttaaattcaaatttatacaaggaagaggtaaaatcgtagccaaggaatggaaccaagaacagattcaaaaagagccatgtagcattttcatcttcctagagagcaggcaggaggaatggacctcgggataaatcatcaccaaaaggattagtttgagatgtgagagaccagaggccaagcatccctgctccccctagaattccatcccagccactgcattcttgtccctgtcacacactgcccatcagtacacatttccaaagctctgacttcacaatgagcttacaacagcactgaaggaacagttctcaccccagctctgtcatcaaagttctgcattcatggataggacaaagcacaggcttggtgacctaaaagttctgggtctaagtcttagaactgtcaatgacctggcggggcacagtggttcactcctgtaatcccagcactttgggaagtggaggcaggtggatcatttgaagtcaggagttcaagaccagcctgaccaacatggtgaaacaccgtctctactaaaaatacaaaaaaaatcagccaggcgtggtggcacatgcctgtagtcccagctactctggaggctgaggcaggagaatcacttcaacctggtaggcagaggttgcagtgagctgagatcacaccactgcactccagcctacgcggcagagtgagactccatctcaaaaaacaaaacaaaacaaaaactgtcaaagactgccctgcatggttgttataaaaactggatcatgtcggccaggcgcggtggtcacgcctgtaatcccagcactttgggaggccgaggtgggcagatcacaaggtcaggagattgagaccatcctggctaacgtggtgaaaccccgtctctactaaaaaaatacaaacaattagccaggcgtggtggcgggcgcctgtagtcccagctactcgggaggctgaggcaggagaatggcgcgaacccgggaggcggagcttgcagtgagccaagatcgtgccactgcactccagcctgggccacagagcaagactccgtctcaaaaaaaaaaaaaaaaaaaaactggatcatgtacaaagcagtctccaaggctaggggatgaagggcattctgtaaatggttgcatgtgtcttcatgcatatcaatcttcctgtcaccatccttgtccattcagacttcacaatattaagacaactggttgtccattcattcgttcattcatttggtgggatcgggtctcgctctgtcattcaggctgaagtgcagtggtgtgatcttggttcactgaagcctcaatctcaaaaacttcaagcaattatcccacctcagcctcccaaaatgctgcaaatacagggatgagccattgtgcccagccttctttctattttttaaggtaaaatgaaaatagacccttgcctcagaatacatacatacatatatgtctacattctaggcaatttaaatatatatacatgtatatgtgtatatgtgtgtgtgtgtgtgtgtgtgcgcgtgtatttacatttcagaaggatacaggctgcaacataaagtcaaagtttaaataatgtagtatgccttcataagtgtggcagactttgatcaacaaaacttaaccaaaaaaccatatggccaagcattgggggtcatgcctgtaatcccagcactctgggaggctgaagtgggagttatcacttgagcccacacagaaggctgaggctgcagtgagctgtaattgtgccactgcattccagattgggcaaaagagaccatgtcttaaaaacaaaaaacaaaaaccaaaaaataaaaaacagacaaggattaagaagtctgatatcagcattcaaattttccatccaataaaagacacaataagagacaaaatgcaagtggcagatagggagaaaataggacttaaaagcacaaagaattattgcccaagagctatagaggattcttacagagagaaaataagatttaaaagcacaaagaattactgcccaagaactacagaggattcttacagaacagcacataaaaagaaaaaaaatgggcaaagtaatcaaagagcacttcgtgaagggaaaatagaaatgtcctgaaaacattggctgggagcagtgggtcacgcctgtaatcccagcactttgggaggctgaggcaggtggaccacaaggtcaggagatcgagaccatcctggctgacacggtgaaaccccgtctctattaaaaatacaaaaaattagccaggcgtggtggcgggcgcctgtagtcccagctacttgggaggctgaggcaggagaatggcatgaacccgggaggcagagcttgcagtgagccgcgatagcgccactgcactccagcctgggcaacagggcgagactctgcctcaaaaaaaaaaaaaaaagaaagaaaaaaaagaaatgtcctgaaaacatcaatatttattttctcattctatcattcaggcaattccaaactgcgactttaagaacacaaaatatacacatttcacgtgagtaaaaataaaatgaagtacaataatataaagctttggtaggtcacaagggaagagggcttggaaagtggtcagcgtgcttggcagggtaccttagtggcagctgtgaaaacataaactgggggcaggcgcggtggctcacgcctataattccagcagtttgggaggctgaggtgggtggatcacctgagctcaggagttcgagaccagcctgactaacatggtgaaaccccacctccactaaaaatacaaaaattaagccaggcacagtggctcacgcctgtaatcccagcactttgggaggctgaggcaggtggatcacctaaggtcaggagttcaagaccagcctgggcaactatgtctctactaaaaatacaaaaattagctggacgcggtggcgcatgcatgtaatcccagctactcgggaggctgaggtaggagaatcgcttgagcctaggaggcagaggttgcagtgagacaagattataccattgcactccagcctgggggacagagcgagactccgtctgaaaaaaaaaaaaaaaaaagaaaacataaattaggtatattctaccacccagcagttccactggtaggtatctcagagtcagaaagctggataaacgaacatcaatccatacctacgtagatagatggtctttttcttttttctttttttttgagacagagtcttgcactgtcacccaggctggagtgcagtggtgcgatctcagctcacagcaagctccgcctcccaggttcacgccattctcctgcctcagcctccccagtagctgggactacaggtgtctgccaccacgcccagctaattttttgtacttttagtagagacagggtttcactatgttagccaggatggtctcgagctcctgacctcgtgatccgcccgcctcagcctcccagagtgctgggattacaggcgtgagccaccgcgcctggccaatagatggtcttaaaggccagcagagagaagagaaaccaccagtgaatgacgaaaattattacaatagatcacttaatagaaaaactggaaacccaaaggtaacggaaggctactttcaaagcactgaaggaaaaaatctatcagtcacactattgttcaagagcaaaggtgagataaagactgtttcagaggctggatgtggtggctcatacctgtactctcaacactttggtaggccaaggtggatgggtcacttgagcccaagagtctgagaccagtctgggcaacatggtgaaaccccgtccctacaaaagatacaaaaattagcagggtgtggtggcatgcgcctgttagtcccaactacttgggaagctgaagtaggagaattgcttgagctccaggggttgaggctgcggtgagctatgattcactccagcctggacaacagtgagactgtctcaaaaaaaaaaaaaattcagaaaagcaaaagcagagttcatttccaaggatactagccagaggaattagaaaatgttgttcttcaaaaaaaccccaagaacgaaggaaggaaaaacaaaggaattgatgaatatgatgaatgtgggctaggtgtggtgactcacacctgtaatcccagcactttgggaggtcgaggtggggggatcacttgagcccaggcatttatgactagtctgggcaacacagtgagatgtcatctcttaaaaaaaaaaaactgatgaatgtatatttaaatcaaatccaatgctgaccacatgaaatgcagaaatcacgacttggaattaatgggatagactaatatactagacaacagtggccaatgaggtgggaatggggcaacagaatcaagtgttctgaagtcctcaagtttctcatgattcatgttagacctgctcaagtcagaattaaaagaataaatgtagtataaaacatctaagcccacagagcagtagtttttaaccagggatgtttctacttccagaagatacttggcaatatctggagatgattttggttgtcagtctgactagggggcagatgttcctaggagccacggatgctgctaaatatcctataatgcacaggatggacttccacaacacaaaatgatccagccccaaatgtccatagtactgaagttgaaaaacattgtagagggaggtcagaattaaaaacaaaaacaaacagacaaaaaacccgatcaatccagaaagctggtaaggggtaaaaaacagcacaaaaaggacagactaaatacaaagtgtaaagtaaggtatcaacaattacaataaatataaatggccttgatgggtcagataaagactgcattagactgtattaaaaaacatgtttgtaacaggtattcctaaagcaaaaggacataaaagccaaaagtgaaaggatgggacaggtgaatgccaaacaaagaagggttttgtggctctttacaaaccaaagaaaaatttcaagtgaggatcacagggcaatgtaacagtaacaacatgcctcaaaacacagagcaggccgggcgcggtggctcatgcctgtaatcccagcactttggtaggctgaggcaggcggatcacttgaggtcaggagttcaagaccagcctggccaacatggtaaaaccatgtctctacaaaaacacaaaaattagcgaggcatggtggcacatgcctgtaatcccagctactccaggaggctgaagcagaagaattgcttgaatctgggagacagaggttgcagtgagccaagattgacccactgaactccagcctgggcaacagagcaaaactccatctcaaaaaacaaacaaacaaacaatcaacaacaaaaaaacacagagcaaagccagctaggtttgtaggaagaaaacagcaaatctaaggatagtgggaaattttatttatctgttttttgaggtttttttttctgatcaagtagctcagattatatttaaattttaaaaaatgttttaatgtaattgtttaatttttataatgggggtctcagtatgttgcccaggctggcctcaaactccagagcacaagcgatcctcctgcctcagcttcatgagtagctgggactataggcacatgccactgcaaccagccatagtgggaggttttattttatctatttaatttttttttttgagacggagtctcactcttgtcgccaaggctagagtgcagtggcacgatctcggctcattgcaacctctacctcccgggttcaagcagttctcctgcctcagcctcccgagatgggattacaggtgcccaccactacgccagctaatttttgtatttttagtagagacaggtttcaccatgttgaccaggctggtctcgcactcctggcctcaggtgatctgcctgcttcggccccacaaagtgctgggattataggcatgagccactgcacccggcaggtgggaggttttaatgaacctcttttagaaatgaaaacgcagaagaatggaaaagagttatgcaggacagaatgtagttacccaatctgatcacacagctggatgaaaatctacgtacaaattaaaataaaatgctttctttctaagcacaagtggaatatttgctaacactgactaggtcaaagaaaaagttcaacaaagcccagactacagcctcttgacttcgaggcagcaagttaaaagccagtaacagaaagaaaaccaaatataataaaacagcgagtaaagcaaactcctatttatttggaaaaataaaaacttgtttctcagtaattgacagatcaaagagaaaacctgatagaaattacaaaacacctagaacaggccacgcacggtggctcatgccttgtaatcccagcactttagggggcagaggcaggtggatcacgaggtcaggagttcaagaccagcctggccaatatagtgaaaccccatctctactaaaaatacaaaaattagccaggcatggtggcgcatgcctgtactcccagctactcgggaggctgaggcaggagaatcgcttgaacctgggaggcagaggttgcagtcagccgagatcatgccactgactccagtctgggtgacagagcgagactccatctcaaaaaaaaaaaagaaaaaaaagaaaaggaaaacacctacaactacacaatgatgaaaacagcacatctcaaaacatgtggcaaatgagaatgcagaatgcagctaatagttcctagattgaaaatgctggtctttaatgcctatattttaaaaagaaggctaggtcaggcatggtggctcacacctgtaatcccagaacttttagaggctgaggcagggatatcacttgaagccaggagtttgaaaccagcctgattatcatagtaagactgtgtctctatgaaagaaaaaaaaagttagctgggtgtggtggtgtaactcgcctttagtcccaggtagttgggaagctgaggcaggaatatcccttgagcccagaagttcaggagttcaaggctgcagtgagtcatgatcgcatcactgcactccagcctgggtgacagagtaagactgtctccaaaaaaaaaaaaaaaaaaaaaaaagggactaaagatgaagttactgtgggtcctgaagctacagatggcagcaagtcaacagccatggtggtctccaaggctgcccacagattttctttaggccatcgctgatgggttctatgtatcattgaaatgaatggcaataacacattctgggatgtgggtaacgcatggtgccctcagaatggtcttgttggcttcactgtatgactgatgatcctccaacaataaacaacctactgcttgtaaactcattggacaagccataaactcaaagtgatatgtaccttattccaccactagaaagaagattcaggagtaagtcccaccttcaacaccttgtaagtacagataaaaaaaaaaaaaaaacagtttaaacatgtaaaaaatgggactttttatgtagttgtacttttagggctcaccattaacttgattataattgactaaaagaaaagaagaccgaagactagtgatctcactgttcaatttacaacttatgggaaagaactatggactaaaccaatgggaggtagaaggaaagtgttaataaaaatcacagcagaggctgggcacggcggctcacacctataatcccagcactttgggaggccgaggcaggtggatcacctgaggtcaggcattcgagaccagcctgatcaacaaggtgacacctcgtctctactaaaagtataaaaattagccaggcatggtggcaggtgcctgtagtcctagctactcgggaggctgagacaggagaatcacttgaacccaggaagcggaggttgcagtgagccgagatcgtgccactgcactctagcctgggtgacagagcaagactgcctcaggggaaaaaaaaaatcgcagcagaaattatggaaattaaaaacaagaaaccagttgagaaaatgaagaaaaccaagtctgtcatttgaaaagacaaatgaaagagaccattaaaaaacagcaagaaaaaggccagacatggtggctcatacctgtaatcccaacactttgggaggctaaggcaggtggactgcttgaggtcaggagtttgagaccaccctgggcaacacagtgagaccccatctctacaaaaaatacaaaaaaaaaaaaaaaaaaaaaaagccaggcgtactggtatgcacctgtggtcccagctacttgggaagctgaggtgggacaatcgcttgagcctgggggtcagaggttgcagtgaacggagagagtgccacttcactccagcctagctgacagagcaagaccctgtctcaataaataaataaaattttttaaaaagcaaaaatgaacacataagtgatattaattgtcagacaggggtttaactaacagtgtaaggttaacaaaatggcaaagttggatttatcctaggaatgtaaggactaggaaacattggaacatctattaacacaattccccatattatcagattaaagtagaagacagcgcccttacaccttatcccaatacattcagaaagtaatatgaaaaaaatctcaccaagactcatgatcaaaatactctcagattcaagtaatagatcctttatctcaaaaattcaaaaagtactttaaggaaacctcagactcctaaggaaaattcttaataattagggtcataggaaattaatgtgaacatcacaccttaaacatcagaaaaaaggaaacatcagaatcatttactttcaagtccaggccaaggccttagacacttgctatgtacacagcattcagcagtgatgtggaggggccagccagtcaggaggaccatgctcccagctgtcacccctggatgctacaaggacccctcccgtggaaagggctcctgaagctgccctgccgcatgacatgtttcctgttctgaatcttctggatagactggggcctggcatggtctgtggccatcctgtgaaaacaagggacttgaaagcacctccccgcacgtttgtgaagggaagatgcacacgtacagttaaaagaaataaaataggctgggtgcggtggctcacacctgtaatcccagcactttgggaggctgaggcaggctgatcacatgaggccaggagtttgagaacagcctggcagacacggccaaaccccatctccagtaaatatacaaaaattagctaggcatggtggtgcacatctgtaatcccagctactcgggaggctgaggcacaagaatcgcttaaacctaggaggcggaggagacagagcaagactgtctcaaaatttaaaaaaaagaaaaaagaaaaaaagaaaataaaagatgagataaatcagacatatacagggtgatatcatttatggaatttcttcagacacacaaaatattctcttagaaataaaaatataacgatgccttggcaagacaccaaccaaggctgtgattacgtctctcttgggggtagggaggctaactcgccttgaggaacaaaaggaatgtccatttcatccataacagatacttcctttgttgaaataaaacttaaacaccaccaagaaagtgaaaacacaacccaccaaatgggagaaaatatttatattatgtgtatctagaatatcgaaaactcttacatttcaataataaaaagacaaaaacccaatttttagaaatgggcgaaggatcttgtcttagtctgggctgctacaacaaatagactgggtggcttaaacaacagaaatctatttctcacagttctggaggctaggaaatccaaaatcagtgtgtcagcatgattggttctggtgagggtcctcttcctggtttgcagatggccaccttctcagtgtgccttcacagggtacagcaggaagcaggagctcctgagagctctcctgtctcctcttataagagcactgatttcattcaaaaaggttctaccctcgtgacctaattacctcccacaggcctcatctccaaataccatcacagtggggataaggcatcaacatacaaattttgaggggacactacattcaccccataggagttctgaatagatatttccccaaagaagtcatacaaatggccaatgagcacatgaaatgatgatcaatatcattaggtattcgggaaatgctgatcaaaaccacagtgagatgccactttacactcactagtatgttcaatatttaaaaacaaacaaaaacaataacaagtattggcaaggatatggaaaaactggaaacttttcactgccggtgcaaatataaaacagtgtagctaatttggaaaccagtctgatgattctcaaaaaggaaaatatggagctgtcatatgatccagctattccactgctacggtttggatatggtttgtccacaccaaatctcatgctgaaatttaatccctactgtggtggtgctggggcatgcagcctaccaggaggggtttgggtcatggaggtggaacccgcatgaatggcttggtgctgttctcacagtagtgagttcttgctctcatgagactggatcggttctgggggaaatgaattagtgcccccagaattgtattgattctttacatagacttagggctttagaatttaaagaattatatggatatttaatattaccagtaaatttagagtacactgcaaaacagattataaaccgtgcacattacataaaaatttactcaaaatggatcagcctaaacataaaagctacaactataaaactctttcttttttttttttttttgagacagagtcttgctcttttgctaaggctggtgtgcagtggcgtgatctcggctcactgcaagctccgtctcccgggttcacgccattctcctgcctcagcctcccgagtagctgggactacaggtgcccgccaccacacccagctgattttttgtacattttttagtagagatggggtttcaccatgttggccaggatggtctcgatctcctgacctcgtgatccgcccaccccggcctcccaaagcgctgggattacaggcgtgaccaccgcgcccagccctttttttctttcttaagagacagggtctcactctcttgtccagcctagactgcaaggtgcaatcaaggctcaacacagcctcaatctcctgggctcaagtgatcctcccacctcagcttcctgagtagctgggaccacagttgcacaccatcacacataattttttttttttttttgagttagaatctcactctgtctcaggctggagtacagtggcatgatctcagctcactgcaacctccacctcctgtgctcaagcgattctcttgccttggcctcttaagtggcacatgcccccatgcctggctaatttttctatttttagtagacagggtttcaccatgttggccaggctggtcctaaactcctaacctcaagggatctgcatgtctcagcctcgcaaagtgctgggattacagacgtgagccaccacacccagcctaaatttttcttttttttttggtagagatgaggtctcactatatgggccaggctggtcttgaactcctgggctcaagcaatcctcccacctcagccttccaaagtgctgggattacagttgtgagccaccacgcctggcttaacactctttttttttttctgagacagagtctcgctgtgttgcccagactgaagtgcagtggagcgatctcagctcactgcaacctcctcctcccgggttcaagtgattctcctgactcagtctcccgagtacctgggattacaggcatgtgccaccatgcctaatttttgtattttcagtagagacggggtttctccatgttggtgaggctagtcttgaactcctgacctaaggtgatcagcctgccttggcctcccaaagtgctgcgattacaggcataagccactgtgcccggcctggcctaatgctcttggccaggtgcagtggttcatgcctgtaatcccagcactttgggtggctgaggcaggtggatcatttgagctcaggaattcaagaccagcctgggtaacacggtgaaaccccatctctactaaaaatacaaaaaattagccaggcatggtggcatgcacctgtagtcccagctactcggaagactgaggcaggagaatcgcttgaacccaagaggcggaggttgcagtgagccgagatcatgccattgcactccagcctgggcaacaagagcgaacctccatctcaaaaaaaaaaaaaacaaattagccgggtatggtggccctcgcctgtaatcccagctactagggaggctgaggcaggagaattgcttgaacctgggaagcagtttgcagtgagccctgatcgtgccactgtactccagctcgggtgacagagcaagactacatctcaaaaataaaataaaataaaaaaagacccatgctataacatgaaacattttcctaagtctaacaagccacatacaaaagaccacatactgcaggctatttatatgaaatgtccataacaggcaaatctataagacagaaagtagattagagattacctagggctgggaaagatgggggagtgactgctaatggtatgggttttctttttcaggggtgatgaaaacattcgaagattgactgtggcaatggatatacaagctagttaatataataaaaaacaatgaattgtacacttaaaagggtaaattgtatgctatgtgaattatatctcaataaagctgtttaaaagagtaagtatgtgtcgagtctgtaagggtcagaaccactagtctagaccccatctgccacatttctggtattttaggactttataaaggaaataacagtccttgcagggatgtgctgagctcatgtagacttccattccctggtactcacctctgaaaggcagagggatccattcaggccaggtgtgtggatacttgacatcgatggttgctggacattagccatttatgcccatccacacggctccagccatctctgtgggacacccataataatgtttactttacttgttcacaactcattaacaaaaataaatcatttaccaactttaatcccatcctgacaaagtcagccatgtgattacaagtgtgataaagagtctgactccattttggatggttgctgacagctttcaagccccaacccctttctccttctccctctcatctgggcaagccaacaagaaagtctgggagtttcctccttggtgccagcaggaagttcaaactatgcaagccccaaccccaaccccattacctaatcacagtgaaagcccagccacagccgggtgcactggataacacctgtaataccagcactttgggaggttgaggcaggaggatcacttgagcctaggagttcaaggccagcttagacaatgtagtgaaatgcctttagccaggcgtgatggtgcatacctgaagtcccagctacttggtagcccaggagctcaaggctgcagtgagctgtgatcgtgccactgcactccagcctgggtgagacagcaagaccctatctcaaaaaaaagaaaacaaaaattaacaaaaattatatagtatctttgtggtgaaaacttgaaaaagtttactcaagacctgagagggcatttgagtaagagaggagctagaccaggtacacagatgaaagggctgggtactgaaaccaggacaactctcactagacctgtaaaagcaatgccttccaagcaaatctctggaataattttactgatgcgtgacaaaattcacactgaagaagacagcttcctgaaatatccatgacaactccttaaaaaacaaaaagaagagaggaaaaagagctaggagtagttgttttgccaaagtcaaggctcctccttaaagttccagtaagcaagcaacccagtgaaggtacaggaaggacagagccccaaacagacttggaggcatttaataatttaaaaggtgataaaggtggcctcacacattagcaaaagtaagtatatctcgtgctgtcttttcagatggaaaaataattacaattccaaattcactcacgctcacacacaggcttataagacctaaatagtatgtgagaaaaaatttttttgaatgattagaaataatagaactaggctgggcgcagtggctcacacttataatcccaggactttgggaggccgaggcaagtggatcacccgaggtcaggagttcgagaccagcctggccaacatagtgaaaccctgtctctactagaaatacaaaaattagccaggcgtggtggcaggcgcccgtaatctcagctactcgggaggctgagggagaagaattgctggaacccgggaggcagaggttgcagtgagccgagattgcaccatttcactccagcccgggcaacaacagcgagactcagtctcaaaaaataaataaataaataaatatagaactacaagaatatctttgagttatcagagtagaaaaaaattgtgggtttttttgttgttgttattttttatttttttatttttcagatggagtcttgctctgttgcccaggctggagtgcagtggcgtgatctcaactcactgcaacctccgcctcctgggttcaagcaattctcttgcctcagcctcctgagtagccaggactacaggtacctgccaccacacgcagctaattttacatctatatctatctatctatctatctatctatctatatatatatatatattttttttttgagacggagtctcgctctgtagctgggctggagtgcagtggcgcgatctcggctcactgcaacctccgcttcctgggttcaagtgactctcgtgcctcagcctcccgagtagttgggattacaggcacgcgtcaccacactcggctaattgtttatatttttaatagagatggggtttcaccaagtcggccaggctgatcttgaactcctgacctcaggtgatctgcctgcctcgacctcccaaaatgctaggattacaggcatgagccatggcgcccagccaagaatttttttttttttttttttttttaaagagacagagtcttgctttgatgctcaggcttgaatgcagtagtatgatcatggctcactgtaatcttgaatgcctgggctcaggagccatgaccataggagtatgccatcacacctggataattttttttctttttttttttttttttgatacagagttttgatctgtcacccaggctggagtgcagtggtgcgatctctgctcactgcaagctctgcctcccgggttcacgccattctcctgcctcagcctcccgagtagctgggacttcaggtgcctgccaccatgcctggctaattttttgtatttttagtacagacggggtttcaccatgttagccaagatggtctcgatctcctgacctcgtgacccgcccgcctcggcctcccaaagtgctggaattacaggcgtgagccaccgcgcctggccattttttttttttaaatgttttgtagagattgggtctcactgtgttgcccaggctggtttcaaactcctgagctcaagtgatcctccagcctcagattcccaaagtgctgggattaaggcgtgagccaccactacatcaagccaaaaaaaatttcttttttcttccttttttttttttttttttttttttggagacagtgcctcactctgtcacccaggctggagtgtagtggcatgatctcagctcactgcaacctccgcctcctgggtttaagtgattctcctgcctcagctgcctgagtagcttggattacatgtgcccaccaccatacccagctaatttttatatttttagtagagatggggtttcaccatgtcggccaggctggtgttgaactcctgacctcaagtgatctacccgcctcagcttcccaaggtgctgggattataggcgcgagccactgcgccaagccaaagaatttctcaactcacaaaaggcacaaaacataaagaaaaagatttgaaacatcttactatatcaaaatgagtaatacaccatgaacataagattaaaagaacattcaaagtaccatctctagaatggcttatcaattacagaggggaaaaagcggaggatcctggcagagagcactttaaccacatgacaaaaacctgatcaccaccagcctcacatgcttcctgacacgacacaccaagaagaacatgatgtcacttagacaatgccctgccaaagacgagagtctgaatttaatattgggaatgtcaactgaacatcaagtgacaatctacacaaccaccagctgggtcttttaaaaatatatcaatttcatgaaaaaaaaaaaaaaagaaaggagagtgccattcaaggttgaggaagactaaaataacatgacaagtcaatgtaacacaggatcctggattggatcctggatcaaaacaaatacccaaaaaccatacaaactgtatcagctgcatacaaactatatcagacaggaattctgtatcaataataaagtatctggggccaggcgcagtggctcacacctgtaatcccagcactgtaggaggccaaggtgggcagatcacttgaagtcaggagttcaagaccagcctggccaacatggcggaaccccgtctctactaaaaatacaaatattagctgggcatagtggcacacacctgtaattccagctacttgggaggctgaggcaggaaaaccacttgagcctgggaagtagaggttgcagtgagccgagatcgctccactgcactctaccctgggtgacggagtaagattccatctttaaaaaaaaaaagtaggtggtacctggtcaagagaggaaggtagtccctctccctctccccctccccctctccctctccccacggtctccctctccctctctttccacggtctccctctgatgccgagccgaagctggacggtactgctgccatctcggctcactgcaacctccctgcctgattctcccgcctcagcctgccgagtgcctgcaattgcaggcacgcgccgccacgcctgactggttttcgtatttttttggtggagacggggtttcgctgtgttggccaggctggtctccagctcctaaccacgagtgatccgccagcctcggcctcccgaggtgccgggattgcagacggagtctggttcactcagtgctcaatggtgcccaggctggagtgcagtggcgtgatcttggcttgctacaacctccacctcccagccacctgccttggcctcccaaagtgccgagagtgcagcctctgcccggccgccaccctgtctgggaagtgaggagcatctctgcctggccgcccatcatctgggacgtgaggagcccctctgcctggctgcccagtctggaaagtgaggagcgtctctgcccggccgccatcccatctaggaagtgaggagcgtctctgcccggccgcccatcgtctgagatgtggggagcgcctctgccccgccgccccatctgggatgtgaggagcgcctctgcccggccgcgaccccgtctgggaggtgaggagcgtctctgcccagccgccccgtctgagaagtgaggagaccctccgcctggcaaccgccccgtctgagaagtgaggagcccctccgccaggcagccgccccgtctgagaagtgaggagcccctccgcccggcagccaccccgtctgggaagtgaggagcgtctccgcctggcagccaccccgtccaggagggaggtggggggccagccccccgcccggccagccgccccgtccgggaggtgaggggcgcctctgcccagccgcccctactgggaagtgaggagcccctctgcccggccagccgccccgcccgggagggaggtgggggggtcagccccccgcccggccagccgccccgtccgggagggaggtgggggggtcagccctccgcctggccagacgccccgtccaggagggaggtggggggccagccccccgcccggccagccgccctgtctgggagatgaggggcgcctctgcccggctgccccactgggaagtgaggagaccctctgcccggccagccgccccgtccgggagggaggtggggggggtcagcccccccacccggccagccgccccgtccgggaggtgaggggcgcctctgcccagccgcccctactgggaagtgaggagcccctatgcccagccaccaccccgtctgggaggtgtacccaacagctcaatgagaacgggccatgatgacaatggcggttttgtggaatagaaaggggggaaaggtggggaaaagattgagaaatcggatggttgccgtgtctgtgcagaaagtagacatgggagacttttcattttgttctgtactaagaaaaattcttctgccttgggatcctgttgatctgtgaccttacccccaaccctgtgctctctgaaacatgtgctgtgtccactcagggttaaatggattaagggcggtgcaagatgtgctttgttaaacagatgcttgaaggcagcatgctccttaagagtcatcaccactccctaatctcaagtacccagggacacaaacactgcgcggaaggccgcagggtcctctgcctaggaaaaccagagacctttgttcacttatttatctgctgacctcccctccactattgtcctatgaccctgccaaatccccctctgcgagaaacacccaagaatgatcaattaaaaaaaaaaaaaaaaaaagagaggaaggtaaaaaatttccctgtttcttcttttccaggttcagattggcaggaaaaaaaaattacaaataaaaaacaattagttttttgaaaaaaaaaaagtatacttgggtgtgataataacactagttttgtttaaatgttcaaatgttctttttggctgggtgtggtggctcacacctgtaatcccaccactttgggaggccaaggcaggaggactgcttaagaccaggagttcaagaacagtctgggcaacatagtgagatctcatctctataaaaaatacaaaattaaaaaataagaacgttacttttcttatgagatcctggctgaagtatttcagagtgaggtatgatatctataacatacttccagtaactcagccaaaaaaactaagtgtatgtaaatatatgtctgtatcacacctgcctctgcaacacctgctgtgtgtacaagtgtgtgtaaaatataaaaagaaaaccctatgtcagaggcgtttgaaccaaagcaaacctccatcttaaatggggactgggtaaaataaggctgaaacctactgggctgcatttccagacagttaaggcattctaggtcataggataacacaggagatttgcacaagatacaggtcataaagaccttgttgataaaacagcttgcagtaaaggtggctaaaacccaccaaaaccaagatggcaacgagagtgacctctggtcctgctcccactagcaccatgacagtttacaaatgtcatggaaacatcaggaagttaccctatatggcctaaaaatggtaggcatgaataatccaccccttgtttagcatataatcaagaaataaccataaaaatgggcgaccagcagttcttggggctgctctatctatggagtagccatttttttattcctttactttcttaataagcttgctttcactttactctatggactcgccctgaattttctttcccaagatataagaaccctctgttgggttatagctcgggaccccctttctggtaacacctatgcatgtgtctcaggcagggagaagataaagataaagctaatgtggcaaaaagtgttaataattttagaatctggatggttttagaagtgttaaactattcctgcaacttctatgcaaatgcggaacttttcaaaatgaaaagttgggtgaagagagaggtaaacaagcagtagaatggaggaaagtcacttgctgtgggaaaaaagaaaaaacagacaaaaactgggtattcaaaacgtacttcaacaagcccaagttcctatagccaaattttttaacttggcaaaaaataaaggaccttttcaggctgatggtaattttaataaaggtttaggttgcatttgtcaaaattcatcaatggtacagggaatatctgtgcatttcactgaaagtcaattttggctcaaaaaatttaaaaaagcactactgaactctaattcatggtaagcatagtgaggtgtttgagggagaagtgttgtgatatctgcaacttactttgaaatgtttccaaaaataggtggattaatgaatggctgaaaggatggacagaaggaaagataagggatacagtaagttcagcagacgttaaccgggtcgttcactgcacaagtctttcagcttctctatctaaaccaacattttatgtcataaaatattgagactggaagactgcacaaaggaaatatgccactaaaccaagggaaaagacagcaaaatggtcactaaacacgtgcaaaaatgcggccctcactgagaattgcagtaaaacatgattttgcaaatatcaaatggaaaaacacacaggtgatctaacaccttcgagactcaaggggaagcggctcagcccactggctcacggccgccaattcagccggaggccgacccaagcctacactgcccctcacacctgacagaaaagctgcagactcgggggttacccccggagacggaccaggacacccagcaggcgtggcaaaacagtctctatgggagggcgggctagagatgcgagcgcggaactcacgggtgacgctaaggaaagagcgggggcgtccagaccagccccggagcgacctcgtcctcagaggagtgaccccaatcgccacggagcgtccccacccaccaggagaactacgcccctggccagaccctcgccctagcgggcccgacatgcccaccacccaggtgaaacccacccgcggacgcgcccctcgccgccccacaaggacccggcggacctccacccgccaagacttccctccgcaggaaacggaggcagcgcagggctcagggatgcgtcggcacttacggttggcggccggcggcagccatgttccgggcgattgcgcttgcgcggctgccgggacaaggatgtgcgcgtgcgcggagtccccgagcttcccccgcccaacgctggggcggccgcgggtaccgggttattcattaccctggcgtggacttgcctcggggcggacgcgcaggcatttactttctcctatggtctcctctgatttttaacccgatgctatcattcttttgttatagagccttccttttatttactgcataatttcctaaaatatttctttatctataatctttttttgagataataatgttaaaattcagaataagtacactcattattcattggcaatataattatttactgggtgcgtggctcacgcctgtaatcccagcattttgggaggcctaatttgttaaaatgactagatctaagaaatgtaaacaaagccagtaactttcctctgtagtaacaatagccggttgaaaatgaaaactacacattttcattctttcagtggttctcttaaactttagcatggggaagcctaaatatttactgacagggaagagagaaactgtggtatgtgcaacggagcaatagggggtggttaaaacaaacggactgggctcacctaaggtcaggagtttgagaccagcctggccaacatggtgaaaccccgtctccactaaaaatacaaaaattagctaggcgtggtggcaggcgcctgtaatcccagctcctcgggaggctgaggcaagagaatcacttgaacctgggaggcggaggttgcagtgagctgagatcgtaccatcacactccagcctgggggacaagagggagacttcgtctcaaaaaaaaaaaaaaaaaaaaggactaacttatatacaagatagacagttctccaaaaacagttcgaaaagtaaactgtgcacttatccacatgatacaacttacctggaaataaaagacacaaaatctatatgttatacagagattgatacataagtagtaaagtaacaataacatggaccagatagattgtccaacctcaagaaagtggcaactgaggggaaagagttggggaggagacaaaggagacctcagttacacctgtgatgcttgataggaaaaaacaaatcaaaacctgaaaatctgactacatgttaacacaggtaaaatctcgatgatacatgggtgtcatctttattatttatagattattctattactctccgaacctctccgcaggttgaaatacttcacaattttgaaatgaaaattagaaaaaaaattctaagccataatagtgattaaattgtcactcacaatagtgatggttggagcaacttggaaatcaattagcaaaagcaataaaggatcttcatgaagaaaatacaaaaacctcattaacagacctgaagttaagttcagaacacactgacatattattcctgaatggaaagtatttttttaatttctccatgaaggccgtatcagaccaggcacagtggctcatgcctgtaattccaactctttgggaagccgggctggggggatcacctgaggtcaggagttcaagatgagcctggccaacatggtgaaaccccatctctaaaaatataaaaattggctgggcacagtggctcatgcctgcaatcctagtactcggtctcaaaaaaaaaaaaaaaatcttcacaaaactactaaacaaaagtatagcaattccaattcaaagactccccccgcccccagctcacagaataaaacaacttaaagatcatatggagaaaagtccaacagtatctggttaaaagaacagtcggagaccggacgcggtggctcacaactgtaatcccagcactttgggaggccgaggcaggtggatcacttgaggtcaggaattcaagaccagcctggcaaacattgtgaaacctgtctctactaaaaatacaaaaattagccgggggtggtggcgggtgcctataatcctagctactccggaggctgaggcaggagaattgcctgaatcctggaggcggaggttgcagtgagctgagatcgtgccactgcactccagcctgggtgacagctatactctcgtctcaaaaaaaaaagtcaggcaccctttattagatactaaaatgtaccatattaagcagatgggctcaaataggcactaatacagacacaaatatcagaagaatagaagagtatgcaagaagagatgagtaaaagtaataatctagtaataaagttaacaataaagcataacatcattaataataacaagggtgttttttccattcagtggcaaagagaaatccttagtgctaagtactgtgctggcacaagtgtatattcttttttgtattttttgagactgagtctcactctgtcccccaggctggagtgcagtgacaagatctcagctcactgcaacctccaccttccaggttcaagtgaatctcctgcctcagcctccagagtagctgggattacatgcgcacaccaccacacccggctaatttttgtatttttagtagagacagggtttcaccttgttggccaggctggtctcaaactcctgacctcaggtgatccacccacctcagcctcccaaagtgctgggatgacaggcgtgagccactgcgcctggccacaagtgtatattcttgtaggtcacatgtaggcaatctttttctgtgaaaagcccaataataaatattttcagctttgcagaccataaggtctctgccatgactacccaactcttccagatagcagcatagataatactaaacaaacaagtgtgactgcattccaataaaactttacagaaacagaaggcccactgaggccattgtttgccaatccctgttcaggaattatctgtttgttcttggggtaggagactttctacatcaagataagcatcccagaagtcatttacaaaatggcactttttttttctcttagaaatggggtcttgctttgctgtccaggatgtagtccagtggcatgatcatagcccactgcagccttgacctcctgggctcaagcaatcctcccatctcgacctccccagttgctgggactacaggtgtacaccaccatgcctggctaatttttttagtacagatggggtctcactattttacccaggctgctctcaaactccagggctcaagtaatcctcagcctcccaaagtgctggcgttacaggcgtgatccaccctgcctggccaacatatgtgatttttttttttttttgagacagtcttgctctatcgcccaggctggggtgcagtggcgtgatctcagctcactgcagcctccaaactctgcatccccggttcaagcgattctcctgtttcagcctcccaagtagcagggattacaggcacgtgccaccacgcgcggctaatttttgtatttttagtagagacggggtttcaccatgttggccaggctggtctacaacccctgagctcaggcaatccgcccgcttgggccacccaaagtgccgggattacaggcgtcagccacagctgtaacttatttaatggggcactcaaggccttttgctgctggctcaacatccctttcaggccttcactgacctatgccacacagcacttgcgcccagggataaagagccggatcagcttctgctcaccccagtcctcttgccagaaaggccctctggcctttgtccagttgctggacgctgcctcttctttctggttggtctcctcctccaggaggcattcgcgaacgccccagtggagccacacggtccatgcctcttccacttatttccccagggctcacattccacaactactaaatcaacaccgacacactcataagcagccccttcctcgtcctttttttccttctgagctcgggaacgtctgctgggggtgagggggactcgcagaccacccccccccccgccccaggcggaggtcgggggccgtcacctggccaggtgtccggggaacggctcgggcggctgacaccgcagtccgcgagaggcgaggaggatccttggactgtgggcaggatcgcaggcagcggaggccctgcccggaaggcgggatctggggacgatccccattcctcccagccgcagacgcggagcccacaggagtccccgcagccctagcccgtgcacccacggcggagccgaggccgcgactccgggcctgttggctggaacccgcagccgtgtctcgggccgccccggtagcggccacccctgagagcactcggccccgttctatcccgcagtggtttggggagtgcaggtcatcactcccacccgccaaggcggacgccggaccctccattgcgcatgagcgcccactgcggcgccgttgctgcgcatgagtgtgcttccaccgcctacatctcccagaaaaccccgcggcgcggcgctccaccgcttccgccctcgggttgcgttagccgcgacgatggcgccccccagtggcagcagggaggctgtgggggtgctgggcgttgcggtgtgcaggttttctgggaggatacctggcgccgaccttgaagggaccccaacgtgagagggaaagacgcccgtgatgccaaggcttgggcagcggacagccaaaatcctgaaaccccgcggtgctccctgtgattcactttccagaggcccctcagtgccccgacgctggcccggagggcggtcgctgactgtcttgagactgaagctcactttcggatcctgggcgttcttgccaggttttttttattaatacagagaaaaccagtggctttgtgacagttagttttgaaactccctgaggagggccgagcgcagtggctcacgcctgtaatcctagcgctttgggaggccgaggtgggcggatctcctgaggtcaggagttcaagactagcctggccaacatggtgaaaccccgtctactaaaaatacaaaaaattagccgggcgtggtggcgggcacctgtaatcccagctactcaggaaggctgaggcaagagaatcgcttgaacccgggaggcggaggttgcggtgagcctagatcgtgccattgcactccagcctgggcaacaagagcgaaactcagtctcaaaagaaagggagaaagggagaaagagagagaggaagggaggaaggaaggaaggaagaaaagagaaagaaagagtccctgaggagcaagcaattccctcagccaaagaggtaagaactgcaaaattgataaatattgcatttatcttacccccacattttattaagaacattttcaaacatgcagaaaatttgaaacgattgtgtgggcctggcacagtggctcacgcctgtactttctgcactttgggaggctgggaagggagggtcgcttgagctcaggagtttgagaccagtctgggcaacatagtgagaactcgtctctacaaaaaaatttaaaaaattaaccgggcttcgtggcgcgcgcctgtagtcccagctactcaggagtctgaggcgggaggatcccttgagcccggggatgttgaggaatgattgtaccactgcactccagcctggacgacagagcgagaccctgtctcacaagaaaaaaaaaattgtgtgaacacccacgtacccaggccctgggttagataattaatattcgacaatatgtgcttgatccaagtatccattattgcatttatttcgatagtaattaaacaggagattgagtgactatgggccagccgtggaggctcatgcttgtaatctcacactttgagaggctgaggcaggagaatcactggagcacaggagatcaagcctgcagtgagctgtgattgcacttcagcccaggtgacacagtgagaccctgtctcacaagaaaaaaataaaaatgagtgactaatggattcaagccaattagcatctgcttattagcacatatgctttctagttacataaactgagtcaaaagatttcatttctctaaaattttgtcatttaaccatcagagtagagtataacatacagggatgtatgaggactgtattagctaatacctgtgtgctctgcatggtaaaccttcaatgcaaatccactgtttaattactgaagcacatttcggaagaactgctacaagtacaattcctagatgctagcgagaatggcataaatatttaaaatagttttagttatatattatgaaatttcctttcatacgtcttctaccatcagtgtgagaaggtcaccgccacccacgttcacccagcagatactcatgttctctaagctttgcatgtctctgttgttttctgttgttgtttgtttgtttaagacggagtcttgctctgctgcccaggctggagtgcagtggcactgagaggtgacagcgtgctggcagccctcgctcgctcttggtgcctccttagcctcggcgtatgctctggccatgctcgggtagcccttcagcctgccactgcgctgtggagcccctgtctgggctggttgaggccggagcctgctccctcagcttgccgggaggtgtggagggaggaggcgcgggcgggaacctgggctgcgcgcgctgcgcttgcgggccagctagagttccggatgggcgtgggctgggcgggccccgcactctgagtggccagccggccccgccagccccgggcagtgaggggcttaccacccgggccagcagctgcggagggtgcgctgggtcccccagcagtgctggcccaccggcgctgcgctcgatttctcgccgggacttagctgcctccccgcgtggcagggctcgggacctgcaggccgccatgcctgagcctccccgcaacccccgccctgggctcctgcgcggccggagcctccccgacgagcgtcgccccctgctccacagcgccaggtcccatcaactgcccaagagctgcggaatgcgggcgcaaggcgcgagactggcaggcagctccacctgcggccctgtgcgggatccactgggtgaagccagctgggctcctgagtctagtagggacttggagaacctttatgtctagctaagggattgtaaatacaccagtcagcactctgtatctagctcaaggtttgtaaacacaccaatcagcactgtgtgtctagctcaggagtttgtggatgcaccaatcagtgctctgtgtttagctaatctagtggggacttggagaatttttgtgtctagctcagggattgtaaatgcaccaatcagcaccctgtcaaaatggaccaatcagctctctgtaaaatggaccaatcagcaggatgtgggtggggccagataagggaataaaagcaggctgcccgagcccccagtggtaacgtgttggggtctgcatccacatggttgaggctttgttgtttggctgtttgcaatatatcttgctgctgcttgctctttgggtccgcattgcatttatgagctgtaacagtcaataccaaggtttgcagcttcactcctaagccaaggagaccatgaagccaccagaaggaagagactccgaacacatccaaacatcagaagaaacaaattccagagacgctgcttttaagaactgtaacactcactgcaagggtctgtgggttcattcttgaagtcagtgagactaagaacccaccatttccagacacgcacaatctcagctcactgcaacctccgcctcctgggttcaagcaatttttttgcctcagcctcccgagtacctgggactataggggcgcatcaccacaccctgctattttttgtatttttagtagagacggagtttcaccatattggccaggttggtctcaaaactcctgacctcgtgatctgcctgcctcggcctcccaaagtgctaggattacaggcgtgagccactgcgcctggcctgttcactgtttttgtgtaacaacttaccacaaaattaccagcttaaaaaccacattttttttcttttttttggagatggagttgtgctctgttgcccaggctggagtgcagtgtcacgatctcggctcactgcgggctccgcctcgtggggaaagccacgtgtatttattatctcagtgttcttgtgagtcaagagtctgggcatagcttaactaggccctctgtttaggatctccagaggtagcaatcaagctgtcagctggcttcattcccatctgtagacttgattatagaagtatctactttcatgttcattcagttggctgaatccatttcttttttttctttcttttttttttttttttatgagacggagtttagctcttgttgcccaggctggagtgcagtggcgcgatctcggttcaccgcaacctctgcctcccaggttcaagcaattctcctgcttcagcctcttgagtagctgggattatagtcatgcaccaccatgcttggctaattttgtatttttagtagagacagggtttctccgtgttgagggtggtctcgaactcctgacgtcaggtgatccacctgcctcggcctccaaaagtgttgggattacaagcctgagccaccgcgccccgcctgaatccatttctttgcagctgtagagctcacagtagcttccttttttcaggccaccagcaagagtctgtaagtaagccttcttatttatttatttatttagacagaacctcacctcgctttgtcattcaggctgtagtgcagtggcgcaatcatactttactacagccttaacttcctgggctcaagcatttctcctgcctcagcatctcaaatagctgggattacaggcatatgcaccaccatgcctggttaatttttttttttttttttttttgagagggagtcttactctgtcgcccaagctggagtgcagtggtgcgatctcggctcactgcaacctctgccccctgggttcaagcgattctcctgcctcagcctcatgagtagctgcgattacaggcgcctgccaccacgccgggctaatttttgtattttagtagagacggggtttcactatgtaggtcaagctggtctcgaactcctgacctcaaatgatctgcctgcttcggcctcccaaagtgctgggattacaggcgtgagccaccgtgcctggccatgcctggctaatttaaaaaaaaattttttttgtttagccaggcttggtggtgtgcacttatagtcccagttacttgggaggctgaggcaggagaatggcgtgaacccgggaagcggagcttgcagtgagccgagattgcgccactgcagtccgcagtccggcctgggcgacagagcgagactccgtctcaaaaaaaaaaaaaaaaaaaaaaaaaaaagatcagtagatactgagaaggagttggaactgcaaaaggtttattggggggcatacctcacacctctattcacaccacatgagctaacatcctgtttgctaaagctagtctcatgtgttttagtcccaagtcaaggaacaggaagaggttctgtgttaattatccactgctttgtaagaaattaccccaaaacatagctgcttaggccaggcacggtggctcaagaccagcctggccaacgtggtgaaaccctgtctctactaaaataaattagcaaagcatggtgttgcgcacctgtaattccagctactcgggaggccagggcaggagaatcatttgaaccccagaagcagcggttgcagtgagccaagattgcaccattgcactccagcctgggcaacagagtgagactgtcacaaaaacaaaaacgggccaggcgccgtggctcacgcctgtaatcccagcactttcggaggccgaggcaggcagatcacgaggtcaggagattgagaccatcctggctaacatagtgaaaccccatctctactaaaaatacaaaaaattagccgggcgtggtgacaggcgcctgtggtcccagctactcagaggctgaggcaggagaatggcgtgaacccgggaggcggagcttgcagtgagccgagatcacgccactgcactccagcctgggcgacagagcgagactccgtctcaaaaacaaaaacaaaaacaaaaacaaaaaacaaaaacatagcagcttacaacaagggaagacaactttttctgtaaaggaccagacagtaaatattttaggtttgggggactatatggtctctgttgcaactgtcaaccttgttgtagcacaacagcagctattgactatacataatacatgggcagagctgtatttcagtaaaacctatggacagttgagtgtggtggctcacacctgtaatcccaacacttttgggggccaaggtgggaggatcacttaaacccaggagttcaagaccagcctgagcaacaaagtgacaccccatccctacaaaaataaaaataaaaaaactttatgggccaggcgcggtggctcacgtctgtaatcctagcactttgggaggccaaggtgggcggatcacgaggtcaggagattgagaccatcccggctaacacggtgaaaccctgtctctactaaaaatacaaaaaattagccaggcgtggtggtgggcgcctgtagtcccagctactcgggaagctgaggcaggagaatggagtgaacccaggaggtggaggttgcagtgagctgagatcgtgccactgcactccagcctgggtgacagagtgagactccgtctcaaacaaacaaacaaacaaacaaaaaacttcatggacactgaaatttgaatttcatataattttcacatcacaaaatataattattcctttattttcaattattaaaagatgtaaaaactacaattaattgatcacaaccagttacagatttctttgttcttctccactcccactgcttcgtttgaccagccaaaacaacaaaaaaaagaattttaaaaaatataaaaactactcttagttcataagccatcccctccccaaaaaggcaacagacgggaccagacctggaaactatagtttgctgactcctagcagtaacaaattaccacagatttagtggcttaaaacaaaataaagttattatcttatagttctggaggtcagaaatccaaaatgggttggctttcctttgggaggcatgagtggagaatacatgccttccattttccagcttctaaaggacacttacattgctaggtctatggccctgagtcactccaacctctgcttccatcatcaaaactcgttttctgattctgactcttctatcttcctcttccacatttaagtatccttgtgaatacactgggcccactcagataatccaggataatctctgtatctcaagattcctaatttattcacatctgtaaaaattcttttgccatgtgaagtaacattcacgaggttctagggatgaggatgtggacatcttttggaaaccattactgagctcactacacagtccaagaaggcctctctgaggaggtcaatgttaatctgacttctcaagtaaaagaaggagccaacatactgaggaagagcattttggtagaaggagagcactagcaaaggctctgaggtggagagaatttggtacaatcaagaaaccagccaggcacagtgagtggctcatgcctgtaatcccagcactttgggaggtcgaggccgacggatcacttgaggtcaggagtttgagacccgcctggccagtatggtgaaacccatctctactaaaaatacaaaaattagctgggcatggtggcgcgtgcctgtaatcccagccacctgggaggctgaggcacgagaattgcttgaccccaggaggtggaggttgcagtgagccaagatcacgccattgcactccagcctgggtgacagcgagactcgttccccaaggaaaaaaaaaaaacaatagcaggcagtgaagacagaatggatgggcaaggggagagagcagaagagtcaggggaaatctggctgacatgtgccaggccttgtgcaccttgattaggagtttgggcttcaccctgaaggagacaggaaaccagaaggggtggagttaacctcgggagtgacatgatctaatttgcaccattagaagggcactgcctgatgtgtgggggaagatctccagcaggcatttagtcacaggctttggaaattcagaagctgagggttagtgatctcgacttggaagtcatcaacataacagtcgaatggtgagggatacaagtcacctcaaacaattggccaagaaacagtcacggtgatgccatgctaggtactgttgccaaggaaattagcaaacagatttggaatctgcctttatgtagcaatcagcatagtgaatgtggatgttctacaaaaaagcataaatatttgagagcaatgagaagtcactcgttgaatttaagcaagagaattaaatgatctagtttacattttaagagagacagggtcgggagaggggggagggatagcattaggagatatacctaatgttaaatgacaagttaatgggtgcagcacaccaacgtggcacatgtgtacatatgtaactaacctgcacgttgtgcacatgtaccctaaaacttaaagtatatataaataaaaataataaaaaaaataaataaataaataaaagagacagggtcttgctgtgtcacccaggctggtgtgcagtggtgcaatcatagcttgctgcaaccttggaatcctgggctcaagaaatccccccacctcagccttccaagtagccgaaatcataagtgcacaccaccacacccggctaattaaaaaaaaactttttttgtagagacgggggtctcactgtgttgtccaggctggtctcgaacttctgaactcaagtgatcttcctgccttggcctcccaaagtgctggtattacaagggtgagccaccacacctggcctgatttccatgtttgaacggttgcactggttgagtgttgggatggtgtcatgaacagaagaggagatgatgatgaaagcactactgtgtagttcagtcaagaagtgtcatgacttggaaccggatgagtcaatggaagtaaaaaggggatcatttcaatgtatgtttaaggtgggctcagaatttggtgattgattcaaaatggaagtggaagggtccatggctactggcatgagcaactgtgatgcaatccatggacaggagaaacctgggagaagaggaggtagagcatgagagtagaactcagtactgacaaggtatggttgtaaaatgaatagacactcccagcaggcagtatgaatatggtgaaatatgtccatgctcagaaaagaatctggaatgaagctacaaattgtgattcatcaatgttcagatggtgtttgaagccagcagaataaaacagaccatactggtggatgagagaagagggctcaggacaagcccccaaagcactggggtccagaagagcatcttgaaaacagcgtgaggagactgggcgcggtggctcacgcctgtaatcccagcactttgggacgctgaggctggtggatcacgaggttgggagatcgagaccatcctggctaacatggtgaaatcccgtctctactaaaaatacaaaaaattagctgggcatggtggcgggcgcctgtagtcccagctactcaggaggctgaggcaggagaatggcgtgaacccaggaggcagagcttgcagtgagccaagatcgtgccactgcactccagcctgggcgacagagcgagactccgtctcaaaagaaaaaaaaaaaaaaagaaagaaagaaaaagaaaagagagtgagaaatgactactagcagagattgatctattttcctatcagccacctggagagactgggcttattcttatttgctcagtcgctcctggcaagacagatttggaaacaaatcaacatgctttcgatgtgcttaataccagcattttctctccagctcttaaaattatggttttttaattgattgaacaagccataatttattcagtgaacaactgtaggggatgtacaaatgtatctggtttttttttttttttggattgtgaaactatcatcaaaagcaaagagataaccaggaaggaagacatttgtctgaaaaccatatgccaggccaggcgtggtggctcatgcctgaaatccgagcactttgggagactgaggtgggtggatcacaaggtcaggagtttgagaccagcttggccaacacggtgaaaccccgtctctactaaaaaaaaaatacaaaaattggctgggcatggtggcgtgtacctgtaatcccagctacctgggaggctaaggcaggagaattgtttgaacccaggaggcagaggttgcagtaagccgagactgcgccactgccctccagcctgggtgacagaggacgactccgtctcaaaacaaaacaaaacaaaataaaaacaacaacaacaaaaatgccatcctgaaagtggaaagattcacaaagaatgagcttcatttcttcacatttggaagaaaccaggactgtaaggtccacttagagaagcagaaggaggaccaggagagatgagtcaaacaaatgatgcttgaggaacactgattcaggaatgaggttgcaagaataagaaatgcacagctaatgttaagtagaattcaagccttcttccactaaacaatattcttttttgttttgttttgttttgtttttgagacagagtcttgctctgtcacccaggctggagtgcagtggcaggatctcaggtcactgcgagctctgcctcccgggttcatgccattctcctgcctcagcttccagagtagctgggactacaagcgcgcgccaccacacccagctaattttttgtatttttagtagagacggggtttcaccgtgttagtcaggatggtctcgatctcctgacctcatgatccaccctccttggcctcccaaagtgctgccattacaggcatgagccaccgcgcctggccttgtttttgttttttgagacagagtctcattctgtcacccaggctggagtgcaatggcatgatcttggctcactgcgaccttcacctcctgggttcaagcaattctctgcctcggcctctcaagtagctgggattcaggcacccgccaccacacctggctaatttttgtatttttagtagagacaggggtgtcgccatcttggccaggctggtcttgaactcctgaccttgtgatccacccacgttggcctctcaaaatgttgggactacaggcgtgagccaccgtgcctggcccactaaacaatattcttatcaatgaataccactacatacatgactcattgtaaaacaacattcagatttaataaaccataaatgcacagggaaaaacccctgaaaattatgattttgggaatgcttttggtcaaaacactcaacttcttagacttgcaaacagttcagtgtagaaaagccttatatatgaaatatacgtagtaaattttttaagtgtagcacaagtctcagtcaatgtaagcgaattcatgttagagagagttgagttgaatgtaaggaatgtggaaaagtgtattcagagctcctctcatctttgttttgagagcactcacacagttgacaaaccctccagatgttctgaatgtgagaaatccctgtttatggtaaatactttctgacatcagagaagtcatactggagagagaccatataaatgtagtatgtgtaaagaagtctttaaacagagctcaaccccactgatgtatgagcaaactctctcaggaaatagaccttacaaatgtgttgagtgttggagagtctttattaagaaatatttctttcagtatgtttcagaacttatacaggagaacaatactataaatgtaatcgctgtagcaaaggctgtagacacaaattataccttattcaatatgagacaatttatacttgtgggaaattatatatttgcagtgaatttaggaaattcttctaaagaagtgaacacttttaccctatagctaagaatctatagagacaccttatgaagggaatcattcagggaaaggttttacactttgctcctccactactcaaaaatcacagaagacacactggagagcaaagtgatggatacagtcatcgtgggaaaggcttcagacgtagcctagcccttatgatgtgacatcagaggactcatactgaggaaaaccccatacatgtaatttgcgtggaagagcattcaggagttgttctcatattattgaacgtaagaggactcatactggagaacactatgaatgcagtcagtattggcaagctttcaaccatggcttttaccttatttgacaccaggaaattcaaacaaattagaaaaactcattgaaaaaagatcaatgtggaaaagctattggttggaattccattttatttgacatcagggataaaggaggcaaaagccaccagttattttttaactcttaagtatctgaatgtaacaagactgcaaacttgtgactccctgcagccacagatcagcagggataagcagttctattctacatatgtccctaatttgccatagaaacaccatttaatggggactcagggtctaggcctgatgaacaatgtctcatagaaatgtctggccatatgcggctgggcacagtggctcacgcctgtaatcccagcactttgggagtccgaggcgggtggatcacgaggtcaggagatcaagaccatcctggctagcaccgtgaaaccccgtctctactaaaaatacaaaaaaaaaaaattagctgggtgtggtggtgggcgcctggagtcccagctactcaggaggctgaggcaggagaatggtgtgaacccaggaggcagagcttgctgtaagccgagatcgtgccactgcactccagcctgggtgacagagcaagactccgtctcaaaaaaaacaagaaaaaaagaaaaagaaaaagaaatgtctcccatatgcctgtaatcccagctacacaggaggctgaggcaggagaatagctgaacccaggaggtggaggttgcagtgaaccaagatcacaccactgccctccagcccgggcaacagagcaaaactccatctcaaaaaaaaaaaaaaaaatggttgccatagataatcatggctgggcacagaggctcacacctgtaatcccagcacttttggagggcaaggcaggtggatcacttgagctcaggagtccaagaccagcctgtgcaacatggagaaaccccgtctctaataaaaatacaaaaattagctgtgcgtggtggtgcattcctgtagtcccagctacttgggaagtgaggactgcttgagggggtcaaggctacagtgagctgagatggtaccactgcactccagcctgggtgactaaacgagaccctgtctaaaagaaaagaaaagaagagaaatggttgtcataggtaatcacatgtaaatttttttttttttaaagagtgagcaacagtaagatttattgcaaagagcgaaagaacaaagcttccacagtgtggaaggggacccaagcgggttgcccataaatgttatcagtggcaacagcgtatctgtttttctacatcacgtatgaataaaagaaccgtcaaccttgaagaatggtgcaggaatcatatggcaacagcgtatctatttttctacatcacgtatgaataaaagaaccgtcaaccttgaagaatggtgcaggaatcatacaccttttagcatcatggggatccttatgtgtataattttatgatagtcctagatgagggctgaaggatatgctatcaatttttttctgcataatccaaatattatcactccaaacaaatcagagagctttatactaacttgctaatactttgccaatagcattcttctatctacttgaatagaagcatcataaagagttgtatgttggccaggcacggtgactcacacctgtaatcccagcattttgggaggccgaggcaggaggatcacctgaggtcaggagtttgagacaagcctggccaacatggtgaaaccctgtctctagtaaaaatagaaaaattagctgagtgtggtggcacatgcctgtaatcccagctacttgggaggctaaggcaggagaatcagttgatcccgggaggtagaggttgcagtgagccaaggttgtgccattgcactccagcctgggtgacaagagcaaaactccatctcaaaaaaataaaaaaaatgagttgtacgtatcttcacatttctaagggcatgtccaatgtcttggcagggttaaaaagacatcatagtctggtgaagtacccatactccaaaactagtgcaaacttcacaagtttcattgcaaatcccttacaaagagcacagggtatgtataagcagcattggtttctcttctgaaaccctggacactagaagataagtgaagattccagaaacacaaagactctgatttcaggatttgatgctcagcaaatatatcattcacacatatgaggagagagtaagcattttcagacctgttagcattcaaaatttgtattctttctggaaaaactgcccaagagaacataatagtaatttcttacaatggaagtatgagccatgtccccaaaagacatctaaaaggacactcatagaagcattagtcataaggggccaaaactggatacagcccagcagtccatcaataataaaatgtataaacaaaatgtggtacatccatagtggaatactactcagcaatttaccaaacattaactactgatacatgcagcaacttggatgaatctctaacacattatgttgacacagaaaaccatagactatatgattccatttatatgaagtttgaggacagaaaaaaaacttatgatgataatcaggatagtggttaactctgggagatattaaccaggaagtggtacagggttttggaaatatattttctgttgacctgtgtgatggatttttatatatggacattatatatttatatatttagacatatataaaaaaactcatcaagttgtgaagttgaggactttatgcctatatatatgtttatgtgtatatatatgtttaaagcttatatagtttatgtatataaaggttacatataaactttaatttaattaattaattttttgagacaacagtctcactctgttgcccaggctggagtgcagttgtgtgatctctgctcactccagcctctgcctcctgggtttaagtgattctcctgcctcaaccacctgaggagctgggattacaagcaagcaccaccacacctggctagtttttgtatttttagtagagacagagtttcaccatgttggccaggctagtcttgaactcctgatctcaagtgatcctaatgccttgacctcccaaagtactgggattacaggtgtgagccaccgtgactggactaaactttaattttaaaagttttaaaacggccgggcgtggtgactcgtgcttgtaatctcagcactttgggaggccgaggtgggcggatcacgaagtcaggagatcaagaccatcctggccaacatggtgaaaccccgtctctactaaaaaaatacaaaaattagccaggtgagacggtgcacgcctgtagtcccagctacttgggaggctgaggcaggagaattgcttgaatccaggaggtggaggttgcagtgagtcgagattgcgccactgcactccagcctgggcgacagagtgagactctgtctcaaaaataaataaagaaagaaataaataaaagttttaaaactatatgcaagctggccgggcacagtggctcacgcctgtaatcccagcactttgggagtccaaggtgggcggatcgtgagatcaagagatggagaccatcctgactaacatggtgaaacctcgtctctactaaaaatacaaaaatcagctgggcatggaggcgagcatctgaagtcccaggtactcgggaggctaaggcaggagaatcacttgaacccaggaggcagaggttgcagtgaaccgatattgcgccactgcactccagcctggcgacagagtgagagtccatctaaggaaggaaaggaaaggagaggagacgggaggggaggggagagaagggaaaggaaaggaagaagggaagaatagagggaagagaggagggaagagagaaggagagaaagaaggaaagagagaaagaaggaaagaaagaaggaaagaagacctatatgcaagctgatgggatgatgggatccaaaggacttatgctgccattttaaacagtctccaaacaaagacaaaacaaatgcctctgccactgctgtgctatgagtcaggatgcttgctgggctggtagcagctaacccacgtcatcagataatgtttactcacatgcctggagagttagccagaatagcttcaggatcagtatgagccagcagctcaacaatgtctccaaatactcaatttccttccacccttcccctcagtggtctgcagtattgattattcttaaattggctcccactgacagccttatggctcagcttcttctttttttttttttttttttttggaatgaagtttcactcttgttgccctggctggagtacaatgtcgcgatctcggctcactgcaacctctgcctcccgggttcaagcgattctcctgtctcagcctcccgagtagctgggattacaggcgcccaccaccacgcccggctaatttttgtatatttagtagagacgggggtttcaccatgttgactaggctggtcttgaacttctgaccttaggtgatccacccgcctcagcctcccaaagtgctgggattacaggtgtgagccaccacgcccggccaatatggctcaacttctttcaagagactgggctttttttttctgtattagtttcctatcaccactgtaacaaattactacaaactcagtgtcttaaaacaagagataagagaaatattaaagtaagacaaatagattctctcatttctggaggccggaagcatgaaatccatacctgggccaaattcaagccttggaggctccaggagagaattcattccttgcctcttccagcttatggtggctgctggcttttttttttttttttttgagacggagccttactctgttgcccaggctggagtgcagtggtgtgatcttggctcactgtaatctccccctcccgggttcaagcgattctcctgccttagcctcccgactagctggcatgacatgcgcatgtcaccacatccaggtaatttttgtatttttatttttaatttaattttattatttttttattttttgagacagagtcttgctctatcacccaggctggagtgcagtagcacgtctcagctcactacaacctctgcctcctgagttcaagccagtctcctgcctcagcctccccagtaactggggttacaggcgtgcaacaccacgtccagttaatttttaaatttttagtagagacagggtttcatcatattggccaggctggtctcaaactcctgacctcgtgatccacccccccttggcctcccaaagtgttgggattacaagcgtgaggtaccccgcccggcctatttttattttatttttttatttttttgagagggagtcttactctgtcacccaggctggagtgcagtggtgtgattttggctcactgcaacctccgcctcccaggttcaagcaattccctgcctcagcctcctgagtagctgggattacaggcgcctgccaccatgcctggctaacttttgtatttttagtagagacgggttttcactatcttggccaggctagtcttgaacttctgaccttgtgatccacccgcctcagcctcccaaagtgctgggattacaggcatgagccactgtgcccagccaacttttgtatttttagtagagacggggtttcatcatgttggccaggctggtctcaaactcctggcttcaggtgatctgcctgcctcggcctcccaaagtgctgggattacaagcatgagccactgcgcccggcctgctggcatgttttgacttgtgactgcacagctccagtctctgcctccacggtcacatcaccttctccttttctgcctatgtgtggtcacatctgtccctgcctccctcttgtaaagatacatgtgattacatgcacaatccaggatcatctcccctctcaagatctttaaatacatatgcagcccctgtctctacataacgcaacattcataggttccaagaattcaggcctgacatctttgggggacatttttcagccaaacacactctcctaacttttaatcaaagtcctgggcttcactctccgtccatgttcattgctttgacacttgtcatggacaggagggtgccttgcactgactggcttggaccagagtgcttgcatgcccctggattaatcactgcagcaacggagacagaatgaggccagtgggccatccactggagctgagattgaggggcagcttcacccatagctgcccaaaagggtatctggggtgttctgagggtgttctggggtgtatctgaggaaagggatgagtggaaaggtctcacaaatgaatctttttttttctttttttttgagatggcgtttcactcttttttgatgggcattgcccaggctagagtgcaatggcgcgatctcagctcaccacaacctctgcctcccgggttcaagtgattctcctgctcagcctctccagtagctgggattacagtcatgtgccaccacgcctggctaattttgtatttttagtagagatggggtttctccacgttggtcaggctggtctgaaactcccgacctcaggtgatttgcccacctcagcctccaaaagtgctgggattacagacgtgagccaccgcgcagcctcacgtgaaaaagacttttctctcaatttcacaatctgtctctctgtctctctctctctgtcacgttttgaaattctggcttccctcctatacccaagggagagctcacacttctcccttacctgagcgaaatgccatctttcccttccagcaccccattcaatcctccaccagggtccccatgtcctggtagctgctccctggatgttgggacttcactcagttccatttttttttttttttaggagacagggtctcactctgttgcccaggctggagtgcagtggcctgatcataactcactgcagccttaatctcccgggctcgagaaatcctcgcacctaagactcctgagtagttgggattacaggcacatgtcaccatgcccagctaatttttaaatttttttggtagagatggagtctcactatgttgcccaggctggtctttaactcctggcctcaagtgatcctcctgcctcagcctcctaaagtgctgggattgcaggcatgagctgttgaccctcagttccagatctttgctggcagcaagtccggaaacttccatccggatctggtttgtggccttataacttaatgtgaggagaggtctctggggtagatgggctccacccaagcagacttttgtgccagctactgtggctgtgccacccaccttcattgcagcacagtctggcgccttctacagatgccaaaaaaaccagttacactcttttccagcttttctcccagccaggacatggatgcatgtgtcaatcctggctaacagggtcagagcgagtcaacaacagagaagtcttccgaaaatgttgtattactttttttttttttttttttttgagacaaagtctcactctgttgcccaggctggagtgcagtgtcgcgatctcggctcactgcaacctccatctcccaggttcaagcgattcttctgcctcagcctcctgtgtagctcggactacaggcgcgcaccaccacacccggctaattttttgtatttttagtagagaaggggtttcaccgtgttgaccaggctgttctcgaatgcctgacctcgtgatctgcccgcctcagcctcccaaagtgctgggattacaggcgtgagccactgcgtccggccaaaatgttgtattacttctttgtggtagggagagtaatgccccctttccttcagagatgtcctcattccaaaccctggaacctatacatatgttaccttcgcatggcaaaggggacattgaagatgccattaaggatctgtttttgttttagagacagggtctcactctgtcacccaggctggagtgcagtggtgtgatcatggctcactgtagcctggaactcctgggctcaagcgatcctcctgcctcagcttcctgagtagctgggaccacagatgcatgccaccacacccagctatttttgttgttgttaagacacggtcttgctctgttgcccagaccagtctcaaactccttggctcaagcaatcttcctgcctcagcctcccgaagtgttgggattacaggtatgagccaccatgcctggccagattcttgagatggggagattattctgaattacttggggcgggccctatttaatcaaatgtctttgtataacttgaggcaggaatcagagtagatgatgtgatgatggaatgagagatttgaaaatgctacactgctggctttaaaattggaggaaggggccataagccaaggaaggcaggtagtctctagaaactggaaaaggcaaagaaatggattctctcctagaccccccagaaggaccacagtcctgctgacatctttattttagcctagtaagacccattttggacttctgacctccagagctgtgagacaataaatttgttgttgttttaagacacaaagttttggtaatttgctacagtggcaatagaaagcaaatacacttcctgatgccaacttcttcagccaaatgttgcacggctaaatgctagacttggaactgtaatcaccatcttaggactgcaaagacgtgtgcctcagaaagaaccaaggccatacactggggagggctgagccaaaggagggacagtgactggttacagctcatacttgagcccaggggtcaaccgtagaagcccttacatctggatttaattacattttttattttgtaatttttagttttatttgtgctgagacagagtctctggagtgtagtggtgcgactacagcctcaacttcccaggctcaggcgaacctcccacctcagcctcccgagtacctggattacaggtgtacaccaccacacgcaactagtgttttgttttcgtagggatggaatctcacacaaaaaactgggcaagtatgttccccaggctggttttgaactcctgggctcaagcagtcctcccaccttggtctcacagtgttgggattacaggcatgagccactgtgcccagcctggacttaatgaaaaacaaacaaacaaacattttttttgagtcagtcttgctttctcacccaggctggagtgcagtggtgtaatctcagctcactacaacctctgcctcctgggttcaattaattcttatgcctcagcctcccaagaagctgggattacaggcatgcatcatcacacctggctaatttttgtatttttagtagagaaaggtttttaccatatcagccaggctggtcttgaactcctgacctcaagcagtccacccacctcagcctcccaaagtgctgggattacagatgtgagccactgtgcccagtcagtgaaatttaagatcatgaatggtggcatactgtcacttctgccaaaactacaccttacatgataaccctttcttgctccccaccagcttttgctctcaagtctcgtttggtcatgctaagccacagtttggggactcctaggagcagccatcacaggtaaccagttctgctggctcaggatggcccctgctgccctgactcagagacacttcctgcaaggcagacatctcatgcagagcagaggccactgcagtcagaaggaagggcctggtagcctcagaggcacagccaaggggctgcaacgatggaaaggagatattccacaagtccaagagtgtgacatggaagcacactctgggatgtggtggactcaagtgatccatgcagatgtggatgctgtctctctttctctgttcatagagtgtggcatgggtcctctctgggtgaaaataggtgcccagaattaatcacacacttccattcaaaataaactgtgccaacttgctgaaccacaaaatgatttcctcgccatggcccctaaataactccgtgataagaactgtatgctattgatggctctgaagtccaaatttattggcaaaagcaaagaacatgcctgaactagtcatttctgcaggcgtttctccttaagatgagtttgaagccaattggttatgtgaagaatagcaatcagttctttctcacactggaggaggaggaagcacaaaagaaagttcaagggtcaagcctcccaaaaggctctgttataatcctatgtgctctttcattgtatctagtgatgaatttgggtaactgacactttactcattggccatctatccttgaacttgataagcattttcatttatgtaagtttacttgtaattcttccaaaacttatcttcacatttcccaacaaactaatttcagacattttgtttttatgattctattgtgacaggaacctccatttcaatatacttgttgcaggtatagattttgtgcattgctttgtggtgttgatttgtccatcttttgtattctgcctagcttattgtaatcttgatttttaaagttttcaattgggtttttaaagtatgttaatgttaataaatgcatttttaggtttcctttcccaatcattacagcactcaggtctatttcatatcagattgattgatttattaagacaaggtcaagctctgtcgcccaggctggagtgcagtggcataatcagggctcactgcagcttcaacttccttagctcatgatcctcctacttcagcctcttgtgtagctaagactacaggagtgtgtcaccacatccagctacattttttgctttaatacagatgaggttttgctacgttgctcaggctggtcttgaactcctgagctcaagtgaccctcccgccttggcctcccaaagtgctgggattataggtatgagcctggcctcatactttatttgtagtaacaagaatatctggaaaatgttcagcattgctgagagcagatttctgtcattttcgatgtgtgtatcctccacggttattgaatggaggaataaacaagaaaaagactcaagaagagagacaggagtcagttctcatcagagaagaaaaggtcgatttcctaaggcaggaaatattgagatgggttgtgttcaggactagcaggaggtgtgtggctggcttgttccttgtctacatcctaatggcctaaagaaaagatgccccacactaaggacagcaagagggaaagagtgagcctcatcctccgtgacttcagtgggcagcttaaccagcaccagaaaagacctatacttgcagattttctttgtgggaaaacggcgttggttatttgggtttttatttatttccaaccaaacatgccttaacggatacagggtgcaaaggcatgtactagattattccaaacctgcctcactggtttgtccggcattctgtggacttcctgcattcctctttgaggcaggccgttttctggaggttgtttgtgatcggcctctgctcagagcccaaattcttagcctttcccccatgtgttatgtccagtgtggattatcttgatggtgagtttacctttgatgttggggaaaacaggcaaagaatgaatgagcagcagtaaccaaagagcctcttttctgggaaaaaagctatgatattaataatttatagttcaaatgcacattaatttatccatacttctgtaaccttacattcccaagctctcagaagttcagagaggtgtcctcaaagctcacatttcaaagatggaaagacacatctttcttctttttaaaaatgattttaaaatgtatccccctttacatggaacaatttgagatgctctgtgtgatgaaacagagacagagaatgatgagtggagatcaaatcctgggtccatgattcagttgcacagctggcttaggactcagttgaacaccactagctgccataatggtccagctgccataatggtttgggccaacttatagctttacatattttattcttagtcatatgttgtttatttattatttatttattcatttatttattttgagatggagtctcgctgtgtcacccaggctggaaggcagtggcacaaactcggctcactgaaagctccacctcctgggatcatgccattctcctgtctcagcctcccgagtagcggggactacaggcgcccgccaccatgctcggctaatttttgtatttttagtagagacggggtttcaccatgttagccaggatggtctcgatctcctgacctcatgatctgcccaccttggcctcccaaagtgctgggattacaggcgtgagccactgcgcccggccatatgttgtttaatttaaaccaacagtagaccattgatttaaaaaagcatatggggccaggggcagtggctcactcctgtaatcccagcactttgggaggccaaaatgggcagatcacctgaggtcagaagttcgaaactagcctgaccaacatggtgaaaccctgtctctactaaaaatataaaaattagctgggcgtcgtggcatctgcctgtaatctcagctattagggagaatgacgcaggagaaccgctagaacccgggaggcagaggcggaggttgcagtgccattgcactccagcctgggcaacaagagcaaaactccatctcaaaaaaaaaaagcacatggaaaaatattaatatatttaaataactcagtatctcaataaacctatgcctgactatgtggaatatatatatatttgagatggagccccctttagtagagacggggtttcaccatgttggccaggttggtctcgaactcctgacctcaggtgatccacccacctcagcctcccaaagtgctgggattacaggtgtgagccaccgcacctggccctatgcagactatattaagagagaaaaagtaaaaattaaactttgcaattgaatgaaataactactatttctacaacacacattttcacttatgatccataatgccttctatgtaattcaaaattccagatattttctaacagaaaatttctccctgttatgagtctgcaaaatttatatgaacaaggctatttatattttgtctctcttccacctagtgtaaatcttcttgtattttgctacagatatactcatgtgtttgatggcaggtgctaccccacacctcttagggatttacacactgtatggtgtaaatacattaccatcctactaaaatccaaatgatcatgaattccaaaatacatctggctcagaaggttttgaacaagcaatcgaggcactgtctaaatccaacaacgatgaataaattttttcaacattttacatgtttaatagttaacatttcttcagaagtcatttttattttacaaattacaataaacagcatatttaatttgctaaacaggaaaagagtatgcagttattaaaagttgaattaaaatggctctcataaatcaatcttcaataatatgcttatataaaaccatctttaggttgggcacagtggctcaagcctgtaatcccagcactttgcggggccgaggtgggcggatcctctgaggtcaggagttcgagaccagcctggccaacatggcaaatccccatctctactaaaaatacaaaaattagccgggcatggtggcacgcccggctactcaggaggctgaggcagggagaatcacttgaacccgggaggcagaggttgcagttgagccgaaatcacgccattgcactccagcctgagcgaaagagcgagactctgtctcaaaacaaaaaaaaaaaaacaaaacatctttggtcaggcatggtggctcacgcctgcaatcccagcactttgggaggccaaggcgggaggattgcttgagtccaggagttcaagaccagccctgacaacacactgagacctcatctctacacaaatatttattaaaaattagccaggtgtggtgatgcacaccagtagtcagtcctagctacttggaaagctgagatgggaggaacacttgagcccaggaggttgggccagcagtaagccatgactgcagcactgctctccagcctgggcaacagaacaagaccctgtctcaaaaacaaattcttttaatcaaaaatcaggttttatcctataccacataaatagaaagaaatcattagaagaatttccacctgcctgggcaacatagtgaggtttctgtctctacaaaaaagtacaaaagaggccaggcggggtggctcatgcctataatctcagcactttgggaggctgaggtgggcagactgcctgaggtcaggagttcgagaccaggctggctaacatggagaaaccccgtctctactacaaatacaaaaattagccaggcatggtggcacacacctgtagtccaagctacttgggcagctgaggcaggaaaatcgcttgaacccaggaagcagaggttgcagtgagccgagattgtgccacctcactccagcctgggcgacagagcaagactctgtctccaaaaaaaaaaaagccaggtgtggtggtgtgcacctgtcccagctatttgagaggctaaggtgggcggatcacttgggcccaggaggtggaggctgcagtaagctgtgatcgcaccaatgcattccagtcggggtgacagagcaagaccctgtctcaagaaaaaaaaaaagaaagaaaaaaaagaatttccaagggggtttgcttccttgtgattatgaagggctagacgtatcctattcaaatccagaacaaaacaagactattagtaaacatgactacttaacatagctctgtcatactagctaggactatacaatgttaattttttaaagttgaaatatggaaaaagaagatatcaaattacttattaattggggatggtgttgtatctataatagacacgaaaaatccaatgaaatattattagactataagatatctgcacagtctctgagtaaatactcctatgccaaaatcaacacactaacagcaacaattaaacaatgtgtagcctgaggttggatcctccacagtgaccaaaaaaaccaacaacccgtggaacaagtttagcaggcagtgtacacgaccaccagagggaggcagagggctgctgagacctgccaggaaatatcaagaaagaggacacagggtcctgagcactgagagagatcattagggccctcaggtcccaagaagacaagaccatactgggacctgggacctaaggaagataagaaaacaccagatgtcggtccttgaggaagccaagagaatacctccttgtcctgagctcccaaggaagatgagagcaccctgggcccaaggatgggtggcacacaccaggtcctggacagctacagacttaggtttcctctccctagacatgagcacctcagcttccaggagcaaactggaccacagggggacactaggcagaggatcctgctcctcctccccaatgcctggggtacagttagccctgatcatctctccagaactagggtagacgtttggcctcattcccatcacacttgtggtccacctagtcttccctccttccccttgcacacccctgaccttcctactcccttcctctaatccccagaactagggtggacgtttggccacgttcccatcacacttccggtcctccgagtttccctcccctccctgaccttgagtggacacttggccctgtccaccctcactttcaggcaggacccatctcccagaaacataagtgccgtcagtcccaactcctgcacacttccggctctcccagtcctccccttctttctcgactttgaaactggtggaacttcagtacctctccccactccccccgcgacttccgtcttccagtccccctccttccccaaaagttgcgtggactctagccccgcctcctacattctccccgccctccctgtccccgcccctccacccagatggacggccagttaggcccgccccctgcacttccggccctacccgcccttcctcttcccaagggacgtcataattaatcccgcccccaccgccacccaaccaagcatcacccattccagcacttccggcctgacccctgtccagcgcctttcctttctccagcttctgctctgccccaagagtggtcgccttcgtggcagggcacgactctctcccagctcgggtcgccgcccacattagtgtggggccctgcggcctagcgtccctcaccagaggcctccccttgcctagctggaccgccgagggacatcgacgagtatcctcctcctgctgtccccggcttcgcctgccgcccctaaccggccagtcaagatggccgccgctgggtgaggcaagctggcgcgccgcgggggcgtctgggagttgtagttcgggacggcgggctgacgcacttcgccgccggccgacgggcgccattgtgcggcgcgcgccgggtgagtgccgcgcgaaacctgcgtccgtcgggggctgcgctgggcgggtccagaaccgttagttgggggcgagcgcggcctctgcattttccgccgagctcgggtaccctgagccggccgtgcctgcagtcctcccgccgctctgtgggatggggtcggtgacccggaaccccgaggggagacagtgctttcggggcgccgcggtggagagaacagatcgcctccggaagcgtggggtctgggccagggaggcgatcccctccgatgcgcgggacagaggaggctcggtgtcctctcggggaggggaaaactggtcctatccagtcctgtgggagtcctatgactcactctgggcgttttccagtttgggtggacttgtcatttcccgctgagggagccgttcctgggcggaggctgcggtagctccccagcggacaccttaagcctctccctcccctcccaacttcggtttcctcaggactctgcccacttccaccagagacacattgagaaggaggaaactatggcctccaggcttccgacggcctggtcctgtgtgagtagaggcttccttcagcttttgagtccgctactgcacctgggaggatgcggatggtggtgagataccaccttccctgagatacccccatcctccagagcacctcggggagggggtagagattggttgggcatgagagatcctgcgtgatggtggaaccgcaggttgcttggttttccaagggtgtagttagaatagagaccagattgtaggggcttctgaaggccaggttaaggctcttgcttgtatcctttatattgggaagagtaattgacaggtcttttgtttgtttgttttttgttttttgagatggagtctccctctgtcgcccaggctggagtgcagtggcgcgatcttggctcactgcaacctccgcctcctgggttcaagtgattctcctgcctcagcctccccgagtagctgggactacaggcgtgtgccaccatacccagctaattttttttttatttttattttttgtgtgtgttttttgtggagacggggtttcaccatgttggccaggctggtctggaactcttgacctaaggtgatccgaccatctcggcctcccaaaggtctatgcagggatcaggcttatgtttagatttcagcagataaattggcatcaagcaagaggtgacagcagcagagttcaataacaagtagaaaagacaggtgaggatggatccctgacaggtgaaggagatagaaagaagcatcagggccctgggtaggggctgacggcttgggtgtgatggtgcagctcagagaattccctaggaggcatacgcaccactcccaaagtcagaattttcaaatgaataagaaatagggggccgggcgcggtggctcacgtctgtaatcccagcactttgggaggccgaggcaggtggatcacgaggtcaggagattgagaccatcctggctaacatagtgaaaccccgtctctacttaaaaaaatacaaaaaattagccgggcgtggtggcgggcgcctgtagtcccagctactcgggaggctgaggcaggagaatggcgtgaaccggggaggcggagcttgcagtgagccgagatggcgccactgcactccagcctgggcgacagagagagactccgtctcaaaaaaaaaagaaaagaaaaatagggccgggtgcggtggctcacatgtgtaatcccagcactttgggaggccgaggcaggcagatcacaaggtcaggagttcgagaccagcttgaccaacatggtgaaaccccatctctactaaaaatacaaaaattagccgggcatggtggtatgcgcctgtaatcccagctactcaggaggctgaggcaggagaatcgcttgaacctgggaggtggaggctgcagtgagccaagattgcgccactgcactccactaggagacagagtgagactctgtctcaaaacaataaataaataaattaaataaataaataaataaataaaatggacagattttcatatgctacagagatctcatgtgttgctctccttattgtaacctgaatagagtcaagcttgggtttgcttggggtttcagacaaagacaggaactcaggatgagactcccaaaatgcccttgggtcatcttgtagaccattctgtgctttcactggcctggtcagcctcccctgtctttcttttgtcgtggatgcggatggcctgtggctgaacaagaatctggatttttaggaaccagtgacctttgaagatgtaacactgggttttaccccggaagagtggggactgctggacctcaaacagaagtccctgtacagggaagtgatgctggagaactacaggaacctggtctcagtgggtaaggctggcctccaggtcaagaaggatctgtgctttgtagcacaaatgtagcacctctgaagtatgtgtctgcttgggctcacactgcaggggcaccagtaggaaaagggcagcttttcagtatgacttctgaatcattgcctagtccatccctccctgaataccagggagatgggtctgtcagggatgttttcagctgcagtagtggatgcttattgttcttgcaacaagagttccggccaggcatggtggctcactttaggagactgaagcaggaggattgcttgagcccaggagtttgagaccagcatgggcaacatagaccgtgtctctattaaaaaaaaaaaaaaaaagaaactccacagaaattccagacaatgcgatgccagtgtcccaacagcttaggagtagcatcaaagagcctgtccctgccaggcacggtagcttacgcctgtaatcctggcactttgggaggctgaggcaggcagatcagttgaggtcaggagttctagaccaacctgaccaacatgatgaaaccctgtctttactaaaaatacaaaaattagccgagcaccccagctactcaggaggctgagccaggagaactgcttgaacatgggaggtggaggagattgcagtgagctgagatcagatcacagcactccagcttgggcaactgagcaagactccgtctcaaaaaaaaaaaaaaaaagcctgtcccttcaaactctggttattgtgaacctttccatgttccccctagtcattgcacagctgtggctccaagcattgcatctgtgttcaaggcagaaacaaggagaaggggtagccctttcacagctgtcatgtttaaccagaaagcaaaagctttcccagctgaccgatctccctttgtgtctggctgaccagaactggaccccttagctgcttggcaaaggagtctaggaaagccaacaacagggatggatggagttgtgttcactgctctaggccagaagtcatgtgccttagcaggggagaagctggagacggcttgtgctgcagtaggatagcattttctcctgaacacagacccccacaagccctgtctcttttcctttgagcagaacatcagctttccaaaccagatgtggtatctcagttagaggaggcagaagatttctggccagtggagagaggaattcctcaagacaccattccaggtgagaaccagacatgggaagcccccacagggaaggggccaactgatgagtcagggaccagtatcttggaaaagcagtagacattgggataccccaggtgggatgctgtgatgagcagttgcagaaccaaactcgaagtttttctctggctccacagtcagcagtgtcctacttggttgaaagtgaacctgttgctggtggcaggtgatacttgtgttgacagtaggggctcccttagtctgttacacgcattgtctactgccctcccctcataatcactggtaaccctggtgtgtatttccagccagactttcttatataggcttacgtgaatgtatgtgaatatatatacacattttgggggtgttataatacagacaagtcagcttctttttgttttggagacagggtctctgtcaccgaggctggagtgcagtggcatgatctcagctcactgcaccctccgcgtcctggactcaagctgtcctccgacctcagccttccaggtagctggatctataggcatgtaccaccatgcccgtttaattgtttttttgtagagacagtgtttcaccatgttgcccaggctggtcttgaactcctgagctcaagtgatccatccacctcagcctcccagagtgctgggattccaggcatgagccaccgtgtctgtctggtctgctttattttatttattttttgagatggaatctcactctgttgctcaggctggagtgcagtggtgtgatctcagctccctgcaacctccgcctcctgggttcaagtgattttccagcctcagcctctgcagtagctgggattacaggtgtgcaccatgactccaggctagtttttgtatttttagtaacggacggtttcaccatgttggccatgctgttcttgaactcctgacttcaagtgattcacccaccttggcctcacaaagtgctgggattacaggcatgagccattgtgcccgacctctgctttattcttaacagcttcagtgtggtccacatttgatttttcttcttttggtggacattaaatttactgcagaaaacttccttgcatactttttttttgcacgaacaagttggtttttctgtaggttggatttctaaatatggaactacaagatcagccaatgttgtaaactaaaaatctggtagtgacaaattgccatctcaaatcctttaaggccaggcacagtggctcacacctgtaatcccagcactttgggaggctgaggtgggaggttgtttgagaccctgtctctataaagaaaataaaataggacaggcacggtggctcatggctgtaatcccagcactttgggaggccaaggcaggcagatcatttgaagtcgggagtttgagaccagcctggccaaaatggtgaaaccccatctctactaaaaatacaaaaattagctgggcatggtgggtgcctgtaatcccagctacttgggaggctgaggcaggagaattgcttaaacccaggagatggaggttgcagtgagcagagatcatgccactgcgtgacagagtgagactccatctcaaaaaaaaaaaaaaaatatatatatatatatatatatatatgtaaaaaatagatgtgtgtgtgtgtgtgtgtatatatatatgtatatgtatatatatatatatatatatatatatataaatctttaaaaataggccaggcaccaggggctcatgcctataatcccagcaatttgggagtccaaggcagtaggattgcttgaggctaggagtttgaggttatagtaagctgtgatcatgccactgcactctaacctggttgacagtgagaccctgtctcaaaaaaaaaaaattaaaaatccttcagcctacgtagagttggctgaagtaaatgacaactctttttcttctttatcaacagcaatttgtaatggtctttttaaggtttgcagatctgatgggataaatacaatatgttcaatttagttcacattttccgcacaacggaccaagttggacatattttataaatctatggcctgtttgtattttttcttttgtgagttcatatattttctcatttttttcttgtttgtgggaattctctatgttctggatgttaatattgaaatatcatatcccagaccatatattgtctacctttatgtagtctctatacagaagttttataatttctttttcttttcaaatatgtctttgtttctgttttagattctgtatcatatataggtagattatccaaacactttagtgtgttgtggtatttgttatatacctcgaactgctgcgctcaagcagtcctcctgactcagactcccaaagtgctgggatcacagcacttaaatttttttctttttagttcagtttatctggaatttcgttttatatatgggtggggttcatcctctgcttattggaaatatcatatttgtcatgggctaaatagctgtctttatatactggcctctatgggctctcccttgatcttttctgtctctgagtaaatgccatgttactgtactttgatatatagtagttccccttgtcatttaaaaaaaagaaaaagtcttagctggctttagcgatctatttctccagatgaacacttattctcagcttgtcagtgttcattgagaaaatcttgttgggatgtgtattacatttaattaggttttcattattactattacctgatcaggttaatcctgcctcatggtcttgcatagttgttccagatgaacctgtcatgctcttaaattctttgatcttttttggccgggcgggcacggtggctcacacctgtaatcccagcactttgggaggctgaggtgggcagatcatgaggtcaagaaatcgagaccattctggccaacatggtgaaaccctgtctctgctaaaaatacaaaaattagctgggcgtggtggttcgcacctgtaatcccagctgcttgggaggctgaggcaggaggatcacttgaacctgggaggcagaggttgcagtgaacccagactgcgccactgcactccagcctaggcgacagagcaagactctatctcaaaaaaaaaaaaaaaaatttatctctctctttttttttttttttttgagatggagtctccctctgccacccaggctgtagggcagtgcgatctcagctcactgcaacctccatcctctgggttcaagtgattctcgtgcctcagcctcctgagtagctgggactacaggcatgtgccactatgcccggccaattttttaatcatctgtaacagttgtgttacatcatgtagttgtattcatcatggatagtatatccaaaattgtgtgaagctcagagtttaaagagttggtatctagtctctgacttaaatggaaaagtttctaggttttgatgagcttaatgctagattctgctttgattcaaatcagttttatctggattaacaaatagtcatgttgtctttcctgatgaataaaaatcggtaatatcttctatttcccttctagagcatactaaagtggtcacacaattcttctcctttgagcagttaacataggagtataatagatgtagaagttttgtaacgtgctgctggagtcttgaatttttaaagggtttttgtgtcagtattcataaattatgttggggaggtggttttctttgtgtgtttgcttggtcagcttttctgtcagtgtgctgaatgctttcccttctctttgttttctgtgctgtggtgcaagtggcatcagaactgcccacttctggcagtattgagctgtgacatctgcacctaacccccatccttggtgatgacctgtttgccacagaatagagggctagagtctttctctgtgactctccccaacccccaacctttctgggggccctgtttctgatttcttcgtatttcagcttcctggctcagcattagtattttggtttttgtttccacattcaaagtttttccttccattcccttcactgaaaatctttgttagcaaaagaggtcactaaactatttcatctgcaaagtctccagcaatgcaagtactttgtatctgcctgcagtggtttctgtgccccttggtttttgagacagagtctcactctatcgccaggctggagtgcagtggtgccatctcagctcactgtaacctctgcctcccaggttcaagtgattctcctgcctcagcctccagagtagctgggactacaggtgcacaccaccacgctcagctaattttttgtatttttagtagagactgggtttcaccatgttggccaggatggtcttgatcttttgaacttgtgatctgcccacctcggcctcccaaagtgctggtattataggcgtgagccactgcccccggcccagcctcctgatcttccttttggtctttatgtctctggattactcaggctgtgacaagtctgcgtttcatccttcttggagctgaggactcatgtcctgaatgggcaaacctccaggccatacacttctggatgatctggtagtatcctaaatctggctgatgtctggggcactgtgggtgccacacatcttgggagagctgactccacaggtgacagattcagggtggtgtcccagagtcagaggccacatgaggggaggctcatcaggaggtactgttgcagtctcagcctgaggtgatgggtgtccaactcatctctgctctgtcacagaaagagtccttaattagatgctgtccttcctcttctccttcttccacctcacagatacttatggagggccttttctgtcccatgcaatatacttactaaaaacttcggtgataaaccaaagcacttacataatctctaccatcttagacttcatagtctaaacaatgatggccttttacaaacatgttacacagatacagtgataaatgtactgagaaggaaaaaagcctgatataaagaaggggagcagtggggaattacttcagaagacctagtcaggggacactgcaggggtgagattttagccaattcctgaaggaaaataagtccgtggacatataggattggtggtgaagacagcttctaggcatggaggcaccatttgaggtgactgtcagatgggaaagaacttagcatttcgagggccacttcgagcctagtggactaggagtaggtaaaatgaagggatgtgacattgcttttcacagctcactctgggtggctgtgaagaaagaattgtggtatgtcacagattggaggcaggcagggcccgcagttatacttggtaatacctgctaacatgtggtaataagtggcctgagagtaacagcacatttggggaaaatcaggtgtgtgtgattcataggtggactcagtggacctaggtgagtgattgagagggatgaaagaacaagccatcaagaatttctcgtaggtgactgcgtctaacatatttcatacgtaaagtcggacctcctgcacataacaaaatccacagatgctcaagtgcccaatataaaatggtgtagtgtttgcatatgacttactcacatcctcccatatagctgaagtcatctctagattacttataataccgaatatgatgtaaatgctgtgtaagtagttgttacactgtttagggaatggtgacgaggaaaaaaagtttgcacatgttcagtacatttgcagccatcttttatatatttttttgagttgaggtctcactctatgtatcacccaggctgacgtgtagtggcatgatcatggctcactgcagccttgaactcctgggctcaagtgatcctcctgcctcagcttcgtgagtagcttggactacatgtgtgcgccattacgcctggctaagttttatatttttttgtcaccatgttgcccaggctggtatcgagcttgcctcaagcaatcctccccgcgtcagtttcccaaagtgctgagattaccgtctttagctaccatgtttggcacatcattcatttttttttttccctcaaatattttcaatccagagtttgttgaatccacagatgtggaacccacagaatatacaggtccaactgtacattctttttgtcactatcttttttctttttttttttttgagacacagtctcgctctgttgcccaggttggagtgcagtggcacaatctcggctcactgcaagctccacctcctgggttcacgccattctcctgcctcagcctcccgagtagctgggactacaggcgcccgccaccacgcccagctaaatttttgtatttttagtagagacagggtttcaccgtgttagccaggatggtttcgatctcctgacctcatgatctgcctgccttggcctcccaaagtgctgggattacaggtgtgagccaccgcgcctggcctttttttttttttttttttttttttggagagtctcgctctgtcatccaggcttctgtagtgcagtggtgcaatctcggctcattgcaacctctgcctcctgggttcaagtgattctcctacctcagcctcctgagaagctgggactacaggactgtgcctgtatgtgtccatcgcttcttttaaaaatatgataaagggaccaggtgtgatggcttatgactggaaccccaacacttagggaggctaaggtgggaggatcacttgaactaaggagttcaagaccacctgacaaacacagcaaaacgtcatctctactaaaaataaaaataataagccagatgcagtgctgcatccctgtagtcccagctacttgggaggctgaggcaggaggattgcttgagcttgggagtttgaggctgcattgagctgtgattgtaccactgcacttcagcctgggcaacacagcaagaaacggtctcaaaaaaatatatctatatctatatctatatatctatatcacatatgagataaaagggtcagatgtggtggctcacacctgtaatcccaacactttgggatgccaaagcaggaggattgcttgaggccagatgtttgagatcagcttgggaaacatggtgaatacaagtctctgcaaaaaaataacaaaaattagctgggtgtggaggcaggaggatcacttcagcctgggaggttgagattgcagtgcaccactgcactccagcctttgtttcaaaaatatgtgtgtgtgtgggtgtgtgtgtgtgtatgataagggagaacaattatttctgagtttttggcattagccaaggatgtggggatgtctggtaaagacctagactttgctgaggggaggaaataaggggtttgtgttttctgtgttttttgtgttttgttttttacctttttttttttttttttttttttttgaggcaggctctcactttgtcacccaggctaaagtgcagtggccccatctcacatcactgcaacctccacctcccaggttcaggcaattctcctgcctcagccttctgtgtagctgggactacaggcacctgccaccacacctagctgatattttggactttttagtagagacagggtttcaccatgttggccaggctggtctcaaatccctgacctgaagtgatcctcccacctgggcctcccaaagtgctgggattacaggtgtgagccaccacacctggtctgttttttactttttgtgttgaaataatttttaatctttttcttcggccgggcgcggtggctgatgtctataatgccagcactttgggaggccaaggcgggtggatcacctgagaagttcgagaccatcctggctaacacggaaaccccatctctactaaaaatacaaaaaatagccgggcacggtggcgggcgccagtagtcccagctactcaggaggctgaggcaggagaatggcatgaagccgggaggcggagcttgcagtgagctgaaatagcacctctgcactccagcctgggcgacagagtgagactccatgtcaaaaaataataataataataaataaataaataaataaaaatacaaaaattaactgggcatgctggtgtgcacctgtagtcccagctactcgggaggctgaggcaggtgaatcgattgaacccaggaggtggaggttacagtgagccgagatggtgccactgcactccagcctggcgacagagtgagactctgtctcaaaaaaaaaaaaatacacatatatgtgtgtgtatatatgtgtgtgtatatatatacacactaatagtatggataactcaatagctttcacattgattgaagtttttgaattgtcccatgtcttaactgattcttgtaatgacagatgaatgagaaggcaccatagagacactcaagggtttgcaaatccagtcgaatacacctatttagacctaagaaggagatccacacagcacataaaaacatccgtgtggaagtcataggtgtttagaatggaatgctttactgtgagtgtgagacggggaactgtcttctaaagtggtcagtttctcccaacagtggcatagctgtgcatctcattaatggacagaactggtattgagtttagacttgggccattttgacaactctgtgtgcttctcgagcttcccatgatagcaagaatggcagtcaagtcagcagtccccaacctttttggcactagggaccggttttgtggaagacagtttttccgtggaccttggggtggggagggatagttttgagatgaaactgttccaccccagatcatgaggcattagattctcataaggaacatgcagcctagatccctcatgcacagtttacaatagggttcatgctcctgtgagagtccagtgccactgcggatctgacaggaggtggagctcagatggtaatgctcatttgcctgccgctcacctcctgccgtgcagcctggtaccagtttatggcctggcagctggggacccctggtttaagtagaagggaaacaaatgctaggacaaatggcattcatcctcaggaaagcactgaatgaggaatgatgctgtgacagtaagcaatgtagggaaaataggtggcactcgaatcttcagctctcactaatgtcccttcaagaaccattgccatatatgtggctcttgggtggaatacttgagatgtaaactattacagatttagtcattaggaaaggaatgcagggaagagactattatgaaggtcatgatttaggaaaccctgcagggcattttacattttttacttgtcaagaagttaagtagaggccaggcacggcggctcatgcctgtaattgcagcactttgagaggccaaggtgggcagatcatttgagctcaggggtttgagaccaacctgggcaacatgacgaaaccctattgctacataaaatagaaaaaattagccacacatggtggcgtgtgtctatagttccagctacttgggaggctgaggtgggaggttggcttgagcctggaaggtggaggttgcagtgagctgggatcctgccactgcagaaaaaaaaacaaagttaagtaggaaatgagtcctacaaataagaacttagcagcttttttgaaacatagaccaaacatgagtctgaaaaataagtttgatgaggtgagtgttttattgggaggaagaaagccaaattcttcttgagattccatcctttgtatagcttgagagggtcacataggctatagagtgatcaacagcataccattcttttatccaagaataagatggagtaaatgtgtttagtttgaaaaaattcactttcagcctgtctttgccctctttaatgtttttgccctctttaatgtctttgccatctttcacgggacattaaccagcaaacaccccaaatgaagtaagtccttttcatgaacttttcaccatctgagaactcacacagggaagaaacctcagaaatatgatcacgtgaggaaagacttctggcctaactcagtcttatcttgagaggattcatactggaaaagttcttacattgagtattacatctaagagcttctgaaaccatgagaatataattgctgtgggaaaggttttatgcatagctcccttattcagcatcacagaagttgtactagagattacctgagaacatagggctgggaagccttcgggtgtcccagaactcactggcaaggatccctctctgaacacagcattttgggaaccccttcagtaggagtcctcattgttttcagcatcagaggactcatatgggcaaacatcctgtgaatgaaatctgtgcagacaaatgaccagccttaactctcaccttatgtgacagaacgaaaaaaatatacactgaaaagaaccccgttgaataataaaaatgaaatgtctcatcctatttttatatcatgtcgtagagaaggcaaaccctacataaaacactgataagtatataaatgtagtcttgtctcttctaatttgcttattatctgacctgaacatctagaacaaatatttaaaatatggatgagagcaggtgttcttttacttctgtatgtccccatttgctaacacaatgactgaattactaggaactcagtacataacgttgagtgaatagatgtctgaagaagttgcaggagacaagaatatgtcttcaaagagaagactgaatacaaggccaggctttgaaacaaaagggtaggtaagagagggtaaaggaaaatcttgagagagtgctacaaagaactctgcggggcccacattcttggcaactaggttgagtctggaatgttgggtggctgtcaaacatgttttggctggaattcagtgaagcagagtcatttcatgctttgtgatcttttattgaagaacactttacattctctgccacctcccacatatctgatctctaagacctgtgtaaatcgtgatcctcttatctggggatcactctccctgtgttctagggcttgtactcagggataacttcaaagtctgaaatgtcttaagtagtaattaagaaggaaaacaaacgaactaagtgtttgaagcagacatttttggggggaaagaaaaataccatcaacagtcctatagaaagaggaacaatggctttaagaaaaaaaaagaagaataaatgagtcagaaatagagaagaaaaaaatattccaagagctcattttctggataggcagaatgccaaaatgactttgagtaagtaaagaataaataaccaaccagtaaacctatacaggggaaaagaacctgtacagatattttacatgtagtttttagttacagtagtttgcacagctgttacaaagaatgagcaacctctttatgtattgatttgaaaccacatgtgtgtacttaaagtatatgacattttaatatataaatatacataaactatttcttaaaatttaagtgtgcttgctttggcttcacatatactaaaattggaacagtacagaagatgagcataaaaatttaaaaataacaaaatacatagtcaagtgcgaacacacaaacatggttgtgtgtcagttgatcatcagtggaaagacatggagacttctttggaattttatattaattttcggaggtgctgcccataactgtgatcatatggaaatggtagctccttcctgttgtgtcactgcttcctggtccagttcctgacacagtataggtgctcagtaattatttgttgagtgtaggaatgaacaaacaaaacatggaaagatttttggaaaagtgtagagttgccaaaattagtcctaggagaaatattaaaattaactttgacttttttttttttttttttttagaacaaattgaccacttgcatctgagtactgccctgagcagtggagattttttaacttcccattaaagacagggatgggtgcagtggctcacccatctcagcaccttgggagggtgaagtgggagaattgctggagccaggaattggagaccaccccgggcagcatagcaattcctggtctctacaaaaaatttaaaaattagccatgtgtgctggggtgcgcacctctgaaatactattaaaatgatactatttggctgggcacggtggctcagtcctgtaatgctggcactttgggaggccgaggcaggtggatcacctgaggtcaggagtttgagaccagcctggcaaacatgtcaaaaccctgtctctactaaaactacaaaaaatagccaggtgtggtggtgggcgcctgtaatcccagctacttaggaggttgagacaggagaattgattgaacccgggaggcggaggttgcagtgagccgagattgtgccactacacttcagcctgggcgacagagcaagactctgtctaaaaaaaaaaagattcagcaaaatgacattacaaaataaattcatagtaatagcttggcttggccaggtatggtggctcacacctgtactggagtggctcaatcccgatactttgggaggccaaggtgaatggatcacttgaggccaggagttcaagaccagcctggccaacatggtgaaactctgtctctactaaaaatacaaaaacttagccgggcgtggtggcgtgcacctgtaattcgggaggctgaggcatgagaattgcttgaactcaggagttggatgttgccatgagcagagatcgcactactgcagtccagcctggcttatggtgcgagattccatctcaaaaagaaagaaaaagctttggtttacaccaggaatatcaaatttgacatggatatacaaaatacattaatacctttaaaaagttataccaaagaataaattattaaagaatgagcaggacctatttgaagaaagttgtaagtgctggagtgtggaagacttgataaatagaagtattaacttattttgagggcttaaaaaggctagaagtactgatgtccttttcctgagtcctgaagtcattctagccatcaacctctggagaaatgctgctggggccattttaccatgggaccagaaatacaagtccctgacatgggcttggctgagaagaagcaagtggggtgcaaactatgtgtgctttcatgttgcaaagaagctgtgttgaatcaacaaatattacttgagcacttgccaggattccaggtactgttccagggctggatcacagtgatgagtggggcaggtcttacacctgctttcattgggcctacatccattccatggctgattggatcaacaaaaatgaagttgcccattcagtacctcaattgcactgggcacctttcaactgctcattggccctgcagctaatgctactatgttggacagtacagatctagaacatctcatttatagaaagttccattggacagcactgctctagatagggtgatagacatgataaattaatgaatcagatatttgggatggtaatgagtgttggaaagagaaggaaacaatgggatacattggtgggggacaagcgaggtacgggtgggcagcagtagttcagaactaagtaggaagatggttctgaggaggtgacgtttgagctcagacctgaatgggaaaggcgaaccaggtgaagatgttggggaaggtgaaccaggcgaagatgttggggaagactataccaggcaggagggtggtgcacatgtggatctctggatgaaaggccatattctaggaaaactaagatggtggctgtgggagacccctttagcgtcaaggacatgaaataacagggtttggaacccggctcctttgttgcccactatgttaggccgttcttaaattgctgtaaatacctgagactgggttatttatgaagataagagatttaattggctcacagttctgcaggctgtacaagggtggcactggcatctggttggcttctggggaggcctcagggagctttttactcatggtggaaggcagggagcaggcacatcatgggaaaagcagcagccagagagaggaagaaggtgccgcatactgttgtttgtttgttttgtttttttttttggagacacggtctcactctcacctaggcggtagtacagtggtgcgatcatgacccactgcagcctcgacttcctgagttcaagcgattctcccacctcagcttcctgagtagccaggactacaggcacatgccgctacgcctggctaatttttttttttttttttttttgtggagatggggttttgccatgttgcccaggccggtctagaactcctgggctcaagcgaaccacctacctcagcctcccaaggtgctgggattacaggcgtgagccattctgcccggccacacttttttaaacaaccagatctcgtgtgattaacttaaccaccaggaggatggtgctaagccattcttgaaggttcaccaggccccacctccaacacagcatcacttttcaacctgagatttggtagggacacagaaccaaaccggatcatccactctgcaaccctgggcagggttcctagcctatcccagcatgaatttcttttttttttttttctttctgagatggagtcttgcactgtcgcccaggctggagtgcagtggtgtgatcttagctcactgtaacctccacctcctgggttcaagtgattctcctgcctcagcctcccaggtagctgggactacaggtgcccgccacctcgcctagctaacttttgtgtttttagtagagacggggtttcaccatattggccaggctggtctcaaactcctgaccttgtgatctgcccacctcggcctcccaaagtgctgggattacaggcatgagtcaccgcaccaggcatatttcttttgtgtatggtgtacatttgcttcctgggactgtgggcagccttcgtgaaatgatggtactgtcattgattcaaaaactgagtaacgtaaagatgatcagcagcctttggcagatcctctacttaggggtgtgagatccacaagtcccagttggcagcctcagtggtacactggaggagacagatgcagaaggtaatccaacagggagcttaggggcactgagggaatgatgagagagaacaggagagctgagagctttccagacaaggaggaaaagtgatggggtactgtgcccagggattaggggagctgagggtaagtactcttctgacttttcccccacaagctgctaaaaagatcattgcttttcgttatattttggactggtatacctggctaatcagcattcactggcaaacagcactgtgaggaagacagctgcctaaggcctgtttgtcaccctggaagggaagcagcagagaggtagaagtatcctgagagaagaaaatagtgtcaagagggagaaagcagcagctcccatcaagcccttaccacatgctgtgcctggactttggtatctcatcactttgggtgaagaaactcaggctcaagaagttaatctctcttgattaaaccccttgctttgagcctcagtgaatttgtttcacaacccattagacagacagttgtaggtgaggtgactacattgctacgggctcattcagttgctggactgaaagccatttggagctccagctgatagggattatgcagctccacatgagtgggttgggtcagtcatgtctgtggaatgagatgggtggaatgagaatccagttccacctctgcctggtggtgaacttaagagcttccattttctcctccatgaagtggagcagctaatttcctgcaatagacagtggtaaggattgccctaaaggtcttgggatagtctatgggttgacatttggaggactgaggtgcacagaatgagtccatcacttcctcaccagtttctgggtttgtggtctctctgttcactgtggtgtccttggttccacagcatgcaaaaggtgctttatgataactgtgtacagaacagagtgtggggcctcatgggttaataataaagattaaagcagaagtaagtacattagaaaggggtggggtggagtagaagaatccaacagttgttttcctaggggccaaggcatgaaaatccctcgattaaggaatacaaaaatgaaattttagaaatttatgaagtaacgtttaagatgtttaagtgtcatgcatggttacctaaaatagtactggtggcccagtgctggtctgccacttagcccccccccaggaagtacagattcagttggtgcatgtcccatgtcctaggcacttagtccggtgctgctgggcctccagtaaatcttatccccagctgcttctcaggaaaaattcaagccttaagagctgtaattgggctgggcacggtggctcacacctgtaatcccagcactttgggaggccgagatggacggatcacctgaggtgaggagttcgagaccagcctggccaagatggcgaaaccctgtctctactaaaaatacaaaaattagctgggcctggcggtgggcgcctgtaatcccagctgcggctgaggcaggagaattgcttgaacccgggaggcggaggttgcagtgagccgagatccctccactgcactctagcgtgggcgactaagagcgaaactccgtctcaaaaaaaaaaaaaaaaagaaaaaaacgctgtaattgaaagaaaataaatgaagtatgctttcaaattaagaaaagttacttggggcgaagtaagtccccagaagtcctaagaaacagaaagggaattaaatacagatcagagcacttataaatgagttggagaggccaagcccccaaaatgaaaatacctcaaaagcttatttgggggaagaggttggaattaggtgcacaagtgtgtctgattaatcttatcaagaagaaaaatcacttcaagcgtagactggtaatggtcgaaaatttaaagcgtggctcaggtcgtgatctacaattgcgccacctcgctggaaggacggcctgggctgcgagaaggcagcgcgggcactggctctgggcagatcccagcgcggagctgactccctgggcccgtgccagcggtgggcacctccagccaaacctgtgcagcgcgcaaacgggaagcccagacagaccagggtttgtactcgaggaacgggagaggggaggggttgggagccgtctgctgtggcctcagcggaacgtctaccccagcccgcgaggtccggagaaataccttcaggtggggcaggcgtggaaactcctgccgcactgccccgttgccccatgtaggcccaggacgtgtccctgtcagcggggactagggagaacggtaccggaagcccgtgtctcggaggctgctgggagctgtaggccccgcgggtgtcgtagttctgggcgcttttccgggtccagggggggcagggttcgaggcgtggcctagaggcgttgtaggcgtcgacccatttcgtcggctgagagactgggtcttgtgtggacggtgctattctgggcgaaagggttagcttatggttgtggcctcgcattcctgagtgcgcgatgacggactcggcgggtgcgtgagagaccagggccgaggaggggtctgtgcaggcggcttccgggctctgaaagatgcttccgcccgagcttttttatttttaacgtagctgcagctattgcacactagtaattttctgctctgcgaccgtttttctgcgctgtaataatcacgctaaaagtagtgcaggttttactgcttacaagggagtttttaacaattttcttaaactgtgttacaacactacccgttcttccagttttgtcctaacaccgcgcggggcaggaatattccaggtatgttgtggaaataaagaccaggccgtccagatgaggacacccagaggttgactcagagccgggtatagtagggagccagccacggtcccttgtgttctgtagagagagtcaaaggcaggtagggagtgagaagacgtgcattcataaggaagggttctgagtggagaaccctattggcttggcggggagcagtaaaagggtatattggcagtcatctaagtcctgagctgtgcttgttgccagaggttgtgggtcagtgctgtgttaactatatttggtttggctgttgtgtttttattcattcctttggtgcctctatacctatcttcatctccgaatagctccagtagattcatcccgtgaaagtagctgtggttccttgctgtggctttgctagttcatgctgagctacttcctggtagaattgtgctgaccatttatattcacaacagcaagggtgaaattgcaggtttgctcttgtcgttgccactaaatattacaaatatcaaaagtaagtcataatctgtagttatttatacttttatatttgtttttaaggccttattttttagggacaatatcaggcttggtagccaaggctggagtgcagtggtgcaatcatagataactgtaaaatcaaattattgggcccaagcagccctcctgcctccaagtagctaggaccacaggtgtatgccatcacacctgattaatttaaacttttttagagacagggtctcactatgttgcccaggctggtctcaagctcctggcgtgaagcgaatctcctgcctcagcctcccaaagtgcagggatcacaggtgtgagccaccccgctggccaaattatttagaattagcattttgaaggggagttttagagagctttcttgtttcctcttgttttgtgctgcctcctcagcatttcaggacagtcctggagttcagtttagcaatgtgctcttgtggactctgtgccaggacccagagcccctgcctttcccatatatcctcgttcttgtccccagtggaggttggagaaggttctttttcctgtgaccatgcatacatgtacagtgtcacagatcccttctcaaccctcattgccttttgttctttccctataacagctctatggagatataattcacacattgtaaagttcactcttgtaaagtgtacagttcagtgtttttaaatatattcacagggttgtacagctgtcactactgtctaattccagaacattttcttcacccaagaaagaaaccgcatacccattagcagtctcccaccaatcctctcaatttctccatttcctaacaattactaatctacttgtctgtctgtggatttttatattctggacatttcatataatatgtggccttttgtgtctggcttcttttacttagcatgatgttttcaagtttcacctgtgttgtagcatatattagtagtacttcattcctttttattgccaatatttcattatatgactagatcacaatttgcttatacatccctcagttgatagacaatgggttatttgtacttgttggctattatggataacactttggtgaacattcttatagaagtttttggggacatatgctttcaattttcttagctatatatacttggggggaatgtctgggtcatggataactatgtgtttaacttctgaggatttaccaacctgttttgcagagtggtacagcattttatgttcccaccaacagtgtgtgagcattctagtttttccacatcctctcctgttatcatctgtctttggtaacagccatgctagtgggtttgaagcatattccactgtggttttgacttgcatttccctagtgaataatggcgttgagcatcttttcatgtgcttgttctcatttgtcttgctctgcttttgacttacagagtatcctgagctccagctggaccctaaattggatcctcttcctgctgagagtcccctaatgaacattgaggttgttgaggtcctcacactgaaccaggaggtggctggtccccggaatgcccagatccaggccctatatgctgaagatggaagcctgagtgcagatgcccccagtgagcaggtccaacagcagggcaagcatccaggtgaccctgaggccgcgcgccagaggttccggcagttccgttataaggacatgacaggtccccgggaggccctggaccagctccgagagctgtgtcaccagtggctacagcctaaggcacgctccaaggagcagatcctggagctgctggtgctggagcagttcctaggtgcactgcctgtgaagctccggacatgggtggaatcgcagcacccagagaactgccaagaggtggtggccctggtagagggtgtgacctggatgtctgaggaggaaggtaagtagaagggtgggtagagggacagcttaatgagggtgtcttggagtaccctgtgggggagataagaactccaggcttcctaggaaggtcatgggaaggattgtgtccgctccatacagaccaaggacatccatgttgcccacgtgttcctgagtcagagccactgaaacccttgcattctttagcccttcgtgggcttctgatggaagcacacagatgaagtgcttcatttttatccctctggcatccctgctgcaccataagccctgtagcacttgataagatagatgggaatactgagctcagagagcccgcagtagcaggagagacagggatttgacaaatgagaatgcatagaaaaatgctgggactatgaggagctcgaggtgatggtgaggcttatgaaggtctgcagctgacacctggtgtggagtggaacttggccagggtaaagaaagggggcaggaaagatgtgccatgcagaggggagcactgcctgtaagggccaagatggaagggatcacagtaaatgcaaaactcagaaaaatcggttatgtttgtgatggaagggagcagaggttggagctggcactgccagtggggactttagtcctaaagcaaagcaaaatgttcttctaaaacagtagggctcgatccctgagttccagaaactggtggcaccactggatttgacctttagagatttaccaggctgcatgtgtggtggatggtggacagaggatgggggcgaggctggacacaggctacccgcagctattgccatgccctctgatggggtggtgtcttggataggagtgatggtgatgtctgactggggagagactacacgtgtggagtgtgtatttgggaataagactgcaagacttggtttcttcatcaggctgagtttcacagagcgtgcatgcttctgcattgctcacctccattttccacatttcacgggtgcccagaagatgtttctgatgtgaacgaatgattgactggttgatgtttgtgattgcaggaaaggggaaggtatcctgcagggggatggtgggattctaagaggccagggcatcctggagatcgggtatccgaggcagcagggcaggcacttgcatgagttgtgtcagatgcaccaagtctggggtgctgtacttggcagaataattgccccaaaggtgtccatgtcctgactcctggaccctgtgaataagttgcctcacatgacaaaggggactttgcagaaacaattaaggatcttgagagggagagatgcactggattatttgagtggatctaacataaccacaggggcccttaggagagggaggctggagggtcagaggagatgtaatgataggagcagctgatagaggaagaagccataagccaaatgtttggggcagcctctagaagctggaaaaggcaaggaatggattctcccttggagcctccaaaaggaacatagccatgctgacaccttcattttagcccagtgaggcacaaaccagacttctcatctccagaaccataaggtaatacatttgcattaatctgagccgctggcattgtggcaattcactataacagcaataggaaactagttagttaggtgccaaggagacagttgtggggttaatgaggtgaaagtcagtgaattcaccctgtgtttaacctcaggggtgaataaaataaattagtgccacagaagacaatgggaagaggctttccagagaaccctgagaatctcacattatgtgatcagtgtgttagttgggacgcttgagtgtgactgctgcaaagccttgcacagaatggctcaagggagaaggagaatttattggaaaagttccagggtgctcgagcatcaggcagggctggacccaggagctccaatagtgtcctccagacttgtcctgtccctcattcttacctcttctgccctccactggcttcatcatgggcaggctgtctccctgcatgggatttctctttcccaaatgttccaactaaggccttgttggctccaatcatctggctataggctgtgttcatcccagatctaatcactgtggccaagagaaagggatggtccagtgtgccagcctaagtcatcttgtggcccaccttgatggtgggggtagattagcattgtggaagcctgtggaccatttggggtcatgtgaggaaggttagaatgaaggagccgtggttacaggggcccttgggccaggtggagctgttgttttcttaggtggaggagacttggtgacgttcacctcaagatggctgcatttcatgggtccagggaaagtctcaccttccatgaggtgggaggagagagggaagaaggaagaggtgcccaaataggcagggtgcagggcttggaggccggaaacaggggctttgactctaaggagggggcgtcagtcagctgcctcacaggaggggctggggccctcagcagcccccggaaagggaaggagtgggaccagagtctcagcagtgaggacactggtgccctgtgacccttggagggtgagccatcccgggcccatccaggtgtgggcactcgggcacgtgctgtgaggggagcagagctggtgggaagggaggacaggagcagaggctgtcatggagccacagtacgatgcaggggtgcggtggccccatgggttgcagagaggccacccttgccctgcctaagggtccccacacctgctgacctcctctggctggtgtctcctcccagtacttcctgcaggacaacctgccgagggcaccacctgctgcctcgaggtcactgcccagcaggaggagaagcaggaggatgcagccatctgcccagtgacagtgctccctgaggtaagcggggagtatcaccctgttttggtcacagcatctcctgtgaggcaggcccacccctgaggcatccactctgccctgggctttcctaagacctcccacaggctgggacattctgagattctgagctcttaggtctgtgctgaagcaatctgagtatgaagagcagccctgccctccagccactgtggcatcactggagacaacgcatggtgacccgggagctgagaaagcaggaggcaagagggaagggactaagtgtttacagagacttgagaggtggaactaccacaggcaggcacatctgtatccaggtcagaacaagagagccctcaaccttcagaaatgcatacttaggtatttatctttggtatctgggatttgcttcagaataacccagagctggggtgtgggtgaaaaagattggtcctgatgcgctgaccactggggtagtggtatgtatgtgtcattggtcagacctgtttgcactgcaaatggcttatactggctcaagcgtagaagtcaatttattggctctcatgtattctctggtaggcttcaggcaaggctgcatccaggtgctcccaggtgatgggaagaatctctggccaacctgtttcatggctctgctttctcccctttcttcttctttttttttgagatggagtttcactcttgttgcccaggctggagtgcaatggcgcgatctcagctcactgcaacctctgcctcccaggttcaagtgattctcctgtctcagcctcctgagtagctgggattacagacagctgccactacacccggctaatttttggtatttttaatagagacggggtttcaccatgttggccaggctggtctcgaactcctgacctcaggtgatccacccgccttggcctcccaatgtgctgggattataggtgtgagccactgcgcgtggccactcccctttcttcttaggcagattctgccccatgtaagcaaaatgcctcagatcctggcaaagcagcgttgggggtacctcttcttcccaaagtcctggtcagttccccagaaaggaccagtcatggctgtgccagggtgactgccctcccccaggtcagccctgtcgacaaaggcaggggcttggttgtcatttccaccaagtgggaagacagtattaatagatggagaaccctctgcagtgggaagatttcagcaatgggcaagctggatagagccgtggttaggatggagttgtttgcttgttgcacttggagctctttatgaagcaagggctctgcctcccagcctgagacccagaccctggtttggacccagtagaactcttgtgggccctgggttggtgtctctgagcaaatccccaaagcaggagagtccctagcaccgtgagctctgtcagaacctcccagctggcctttcttctgccctcattgacaaccctctgaccctcttgctgagcatagacacatatgtgatgttacaggagccagtgaccttccaggatgtggctgtggacttcagccgggaggagtgggggctgctgggcccgacacagaggaccgagtaccgcgatgtgatgctggagacctttgggcacctggtctctgtgggtaaggctgtgccccctcttcacccacctcagggctggtaggccacaggagccccaagtcaggggtgttcaccttctctagactccacactgggcattccctcaaggggcccttgctgcatccagggcctgtaagtggaactgtagacctagaggggtgaggtcactgggtggccagaagcagccttaggtccggtgaaggagtgatttgctatctatctcctgagggagtatgagagaacaggaactcgaagagctcggaggacactccctgcccttcctgtcccttgttcaccaaggtcagtgctcccctccctgccgcttcattgcttttcagtctctctccaggttgcatgactctatttgggagaaaaaaaaaatcctgacttttgaacttaattatgcatttcatgctctcagacccatcccagcacatctctctatgggatccacatcttttgtttatttttttcagggtgggagactacactggaaaataaagagttagctccaaattctgacattcctgaggaagaaccagcccccagcctgaaagtacaagaatcctcaagggattgtgccttgtcctctacattagaagataccttgcagggtggggtccaggaagtccaagacacagtgttgaagcagatggagtctgctcaggaaaaagaccttcctcagaagaagcactttgacaaccgtgagtcccaggcaaacagtggtgctcttgacacaaaccaagtttcgctccagaaaattgacaaccctgagtcccaggcaaacagtggcgctcttgacacaaaccaagttttgctccacaaaattcctcctagaaaacgattgcgcaaacgtgactcacaagttaaaagtatgaaacataattcacgtgtaaaaattcatcagaagagctgtgaaaggcaaaaggccaaggaaggcaatggttgtaggaaaaccttcagtcggagtactaaacagattacgtttataagaattcacaaggggagccaagtttgccgatgcagtgaatgtggtaaaatattccggaacccaagatacttttctgtgcataagaaaatccataccggagagaggccctatgtgtgtcaagactgtgggaaaggatttgttcagagctcttccctcacacagcatcagagagttcattctggagagagaccatttgaatgtcaggagtgtgggaggaccttcaatgatcgctcagccatctcccagcacctgaggactcacactggcgctaagccctacaagtgtcaggactgtggaaaagccttccgccagagctcccacctcatcagacatcagaggactcacaccggggagcgcccatatgcatgcaacaaatgtggaaaggccttcacccagagctcacaccttattgggcaccagagaacccacaataggacaaagcgaaagaagaaacagcctacctcatagctctcaagccagttgaagaaaccttgccttttcagcttgaccctgcaatataacatgcacaggcctgcttgtgaatcaggactgaatgtgaaagggaagtattgagtgaggacattcccaaaaccaaaggacaactgaggagactgcccagcacataatgaataaataagaaaatgagtgaggagttattaacatcatttggaaaaaagatttcccattcacttgatattgtttgttcactcatttagtcattaaaagtgagattaataaaatctgaaaatgttatataataactttaaaaagccaggtaattaataatctgcactgatattacatccacagtaccacagtatttatgtgtatgaattaaggattaaaagataatgtggataaataaactattgatctatgtctgtgtagaacctgtgtatttcctgcctgcttaaatatctctatagtaatgattaatatttaagcaacattaaaacacaaggaaggagatcatcagatagttctagaagattctgtgcaaggctgcagcaccttgggcacaagatactatgtgagttgggatgactgaatctttctgctccttagggggttgtcatgatatggttaggtggaggtaaggaaaatttaaacccaaagggctggaaaccccaggcaagtgtggggcttcctgggaatattcatgtttcttttgttatttttcgcacagaatctcatcctgtcacccaggtttgagtgcagaggtagaatcatagcttactgtagcctcgaacacctgggctcaaaggatcacctgggctcaaagatcctcctggctcagtctttcaagtagctgggactataggcatgcaccaccatgcctagcttcatttggtttgtgtttccatttttcctgagagactatcacaaggaaggcaactgctctggccaggagcccatcactaagttaagcaaaaagacactggcaatactagagcatgtacttgcccacagttcacattctttctccaggtcacatagcccacagtatatgacccgctccattccttgttctaggctccacctttgctcttgagttccatgtaacatttaacataaaactctggatcaaaaatacttaggttcaagacactggttgagtgctactctgcatagcctctttagaacccttgggtcttgccaacaagggtgaggtgcagtcgtgccatctaggatgagagtacctcctttctctgcagaagtgaaaaacccttggagacaggaccagagtagataccttgagcccatgtgcctggagaatgatggtggtacaccagcagccctattgccattcacacattgggcacagggcttgtggttgctatgttgcttctagtcatttcagcactttaatatggcacatgttagcttctttgagaacatacacagttgaagaacttgcccagggacgttagttggtaaaaacagcctcctcagctgttcagaactctacaatatcacctctcaagaatgaaccaaagaatgggacccttgagattagaacctggtaaactaaaaattcccagattccaaatcctagactgaggggtgagtccaaagttttagtgatggcttcaggaactgagatgatggtttgagctgggtctgggaaaataagggacccaggaataggaaagggggagaacatactagggtatgggagagctgattggaactacaaagtacaaggccagtgggtccattccaaggtatggaatggctcatctcatggctggcacctgggcttgaggtggctctaaggctgagttcagttgtgttaggttctctcatccaaagagccagggttccaacagtattaggcagaaacagcatggctttttctgacccagcctaggtcacatggtgtcaccccaggacagtctatcctttacaagccagtcactaaggccagccggattcagtgggaagggggttaaactccatctcttgaagggagagtaccaaggttaagaaaggcaggagagtgtggtggccaactctggttaaaaaggtctacaagtatgccagcatttacctttaaatactgtgtatccccacctgtgcttgcaagacaggaagaggaaggcagggagagaggctgcacatgtgggagctgacccactagacacaattattagatgtagtttaaatcctggctctgctcctcactgggtctgtgattgtcagaaagaagattaatgcctggagggtccacgttccatatatccagtacaccagtgaaaaggtacatgacgctgggcacagtggctcacgcctgtaatcccagaactctgggaggatcatctgaggccaggagttagagatcagcctggggaacatggcaagatcctgtctggaaaaaaaaaaaaaaaaaaaggccaggtgtggtgatgcacctgtagtcccagctactcaggaggctgaggtaggaggaatgctcgagcctaagagtttgaggctgcagtgagctatgatagcacctctgcactccagcctgtgtgggagtgagaccttgtctcaaaaataaatttaaaaattgtaaaaagaggttacaaagatgttagcttctttgagaacacatgcagttgaggaacttgcccagggatgttggtaaaaacagcctcttcagccattcagaactctacaatatcacctctcaagaatgaaccaaagagtgggaccaattaattccagcacatccacttatttgttcaacaagagtgtctgtatcatttaccaagaaggattaaaaagtaattttgttctctttgttcctttgtggctgatttttaatgcagagactatgtatcctggatctagccagttgagcaaactctgattaattttaataggttttactaaaatctggatttccatacttttaattttatgttaatctttgcatagttttcttctgaatacaaagtaacagaagatttgattttttaaaaatctctctttccaccatcctttggtgccgtcgtcaaggtgcggatgaatatcctgtctgatgttctcaagaggatcaacaatgctgaagagaggcaaaagacagattattactaggaggtgctccaaagacattctccggtttctaattgtgatgatgaagcatggttacattggtaaatttgacatcactgatgatcacagagctggggaaattgtcgtgaacctcacaggcatgttaaacaagtgtggaatgatcagccccagatttgatgtactcaaagttctagaaaaacggcagaataatctgcttccatcctgccagtttggtttcattgtactgacttcagccggcatcatggaccacgaagcagcaagacaaaaatacacaaaagggaaaatcctgggattctttttctaggggtgtaatgcttacaaaaaaaaatgcctccgtggactacagtgcatccaaaaacaaaataactgacatttgtaccacacaaaagttaccctccaatagtgtgatctttctttcttaaggtgtaaaaccacactcggggttgtggtatttgatgctgtgcgaaattttaccttccctcgcagctcgcgagaatttgcggggccattcagcatggccagcatgggtccgagtgaggagggtccatcctcattgcacaggctacggagtggctccccgggtactttccaaggccaggtctccacctcgaagtgcgtcaaaggctgcaggccctggggaggctgaccagggcccgagggaggacgacaagcggggacgttggcggaggggttaatggcggagtcgcgatccagccgagcccacaactctgggaggctggttctgcctctctcccgaagcgtcgcccggctaagcttcgagcaccaggacacacaaccgccgactattccagagcccacagtcggcttcacgctggaggccggaaacgacacgtccccaaagcccgcgcgcgcggcccgccagaactgacctacccaatcaccgcaccgctgcgatcaagcggcgacacacgttgccgggtaagagtcacgctttggcaaataagcaacctgcctcatccaatcagcgtctcgcctgcccggttagttccttgtcttgcccaaccagattcttgcctcctccataccgctacttgcgtgtgccggtgcctggcccaatcagcgtcttgcgcctcttctcgctcccgggcctggtggaaacagactcagggccattttggctacacctgggagcagggcaccctggcggctggctgcggccgctgcagagatgaatggccccggatctgtggaggctcgcctgcccctggggaccccgtcctcggcctggggggtagtgtcaggtgtgtttgaaccagagcaattccatcttgaatagggactctctaaactaaggctaagaccggttgggctacattcccagtaagttaaggcattcttagtcacaggatgagataggaggtcggtacaagatacaggtcataaaaaccttgccgataaaacagcttgcaataaagaagccgcccaaaacccaccaaaaccaagatagcgatgagagtgacctctggtcgtcctcgctgctacactctcaccagggccatgacagttacaaatgccatggcaacgtcaggaagttaccctatatggtctaaaaaggggaggcgtgaataatccacccgatgtttagcatatcattaagaaataaccataaaaatgggcaaccagcagtcctcggggctgctctgtctatggagtagccattctttattcctttactttcctaataaacttgctttcactttatggactggacttgaattctttcttgcatgagatccacaaaccctctcttgagatctggatcgggactccctttccggtaacagtgagagcccagactggagacaggtggtcacaggctcctaggggattggggccctagggagccgttggtctgtgcaaccgccaggccccgcccgggtctcctcattaggctcaggcgcacaagcgctgagctggcctggtcctcaatcacaggtgagaagcatcccgttcccaccttgggaatggcccagcgcctgccggtcctagacgcccagcctggcctggccacggactcttggtgaagggttgggctgcgcatcactcagctgtggtagtggtgatgatggtaggggtgctgggggactcgagctgtgtcctgagcagaaacttgaaagaaatgtgagtagctctgccgggaccacgcatctctaggcacgcccggcagggggaatatcgagatgcttactacaccagtttgtgttttgccatatccaggatcctcagtcttatttgctgaataataatttttattatttacttatttactttttgataaggagtctcactctgtcgcccaggctggagtgcagtggcgccatgtcggctcgctgcaagctccgcctgccgggttcacgccattctcctgcctcagcctccggagtagctgggactacaggcgcccgccacgacgccctgctaatttttttttttttttttaagtagagacggggtttcaccgtgttagccaggatggtctggatctcctgacctcgtgatctgcccgcctcagcctcccaaagtgctgggattacaggcgtgagccaccgcgcccggcctgctgaataatttttttaaatccatgcgttaaaattcaaaatttataaactgatttaaaagggatcatttgggtcgcgccctgtgggtcaggcctgtaatcccagcactttgggaggcccagacgggtgaatcgcttgagcccaggagttcgagatcagcctgggcaacacagcaagactgcatatctgggaaaaaaaaatgctgggcatggtggcacacacctgtagtcctagctacttgggaggatcgcttgagcccaggagttggctgctgcagtaagctgtgattgtaccgctgcactccagcctggccagcagagggagaccttgtctcaaaaaaagaggggtgggggggtggggccttttggttatttacttgccaaaataaacgtgagttaaatacagttggttaaaggcccagcgcagtggctcacacctgtaattctaaaactttgggaggctgaggtgggtggatcactcgaggtcaggagttcgagaccagcctgggcaacctggagaaatccgttctctaccaaaaatacaaacattagccaggcacacctgtagtcccaactactcagaatcctgaggcaggagaatcccttgaacacaggaggcagaggttgcactgatccgagatcatgccactgcactccaggctggacaacagagtgagtgagactccatctcaaaatcatcatcattatcatcatctacaaggggaaaatggcagaagttaagacaattttgaacaggaagaacaatgtacggaatgtcttaccaaaatgaaagtgtgtattgttaagctgaagtaattaaaactgtgaccctggagcagacagagacagagcaatgcaacaaagctatgtagagatggcatttgtggcatatgataaagcagccatttttaagttatccagaaaagagggaatgttctgaaaatgtgctgggagagtatatagttgtctggaagaaaattaagtcagacctccatcataccatacagaaagttaaatttcagagggatgaaagaacatagggccaggcacagtggctcatgcctgtaatcccagcacttcgggaggctgaggcgcgggcagatcacctgaggtcaggagttcgagataagcctggccaacatggtgaaacgccatctctactaaaaatacaaagattaaccgggtgtgctggcagacgtctgtaatcacagctgctcggggggctgagacaggagaattgcttgaacccgggaggcagaggttgcagtgagccaagatcacaacactgcagtccagcctaggtgatggagcaacactctgtcttaaaaaaaaaaaaaaaagagccaagcgtggtggctcatgcctgtaaccccagcactttaggaggccaaggtgggcagatcacctgagatcaagagttcgagaccagcctggccaacatggcaaaaccccatctctactaaaagtacaaaaattagccaggcgtggtggtgggtgcctgtaatcccagctactcaggaggctgaggcaggagaattgcttgaacccgggaggcggaagttgcagtgagctgagatggagtcactgcactccagcctgggcgacaagagtgagactccgtctcaaaaaaaaaaacaaaaaaaaaatcacactcaacaatttatcaaaaggatgacagtatatttaaactcaggaatgcaagaatgcttcaggccgggcatggtggctcacacctgtaatcccagaactttgggaggccgaggcaggtggatcacgaggtcaggagatcgagaccatccttgctaacatggtgaaaccccatctctactaaaaatacaaaaaatacaaaaaattagctgggcgtggtggtgggcgcctgtagtcccagctactgaggcagcagaatggcgtgaacccggcaggcggagcttgcagtgagccaagattgcgccactgcactccagcctgggtgacagagcgagactccgtctcacaaaaaaaaaaaaaaaaaaaaaagaaaatgatttaaaagatcaaaaggaaaaataaatgcttatgacagtctgacagccaagaaaattataatcaaaataacagtcaaggaaccggccttgcttgatattaaaatgtcattataatctcaacagaatggtattatattattatttatttgtttgtttatgtatttatttttgagacggagtctcgctctgtcgcccaggctggagtgcagtggcacgatctcggctcactgcaagctctgcctcccgggttcacgccattctcctgcctcagcctcccgagtagctgggactacaggtgcccgccactatgcccagctaattttttgtatttttagtagagacggggtttcactgtgttagccaggatggtctcgatctcctgacctcgtgatccacccgcctcggcctcccaaagtgctgggattacaggagtgagccaccgtgcccggcctattgatttatttttttgacacggagtctcactccctcacccaggctggagtgcaatggcgcgatcttggctcactacaacccccgcctcccggattcaagcgattctcctgcctcagcgtccccagtagttgggattacaggcgtccgccaccactcccggctacagaatggtattattataagaattgacaaatggatgtgtggaagaaaaatgatagcttatttgaaaagtgattttgggagaattctagctttcccagtaagctgatgcctgcatcagacctcaaacaaaagtaattcctaatagactaatgatttgtatgtttttaaaattttttttatattttgagatggagtcttgctctgtcacccaggctggaatgcagtgccgagatcttggctcactgcaacctctgcctcccaggttcaagcgattctccccgctcagccccactagtagctgggattacaggcgcgtggcataatgccctggctaatttttgtatttttagtagagacagggtctcaccatgttggccaggctgttctcaaactcctgacctcaagctatccacccgccctggcttcctaaagtgctgggattacaggcttgagtcaccgcacctggccagatttgcatgttttaaaaagtgcaaaagaaaatttagaagactacataaacataaaatctgtggcttgcaatactttttaaagcaagacaaaaaactcagatctattcataaaggaagagtagacaacatactttacataaaaagaatttttttttttttcgagacaaagtcttgttctgtcacctaggctggagtgcagtggtgcaatctcggctcactgcaacctctgcctcctgagttcaaacgattctcatgcctcacccgcctgagtcgctgggattacaggcatgcaccgccaggcctggctgatgattgtatttttagtagagatggattttgccatgttggccaggctgtcttgaactggcctcaagtgattctcttgcctgagcttcccaaagtgctgagattacaagcatgagccactgcatctggcctaaaaagaattttttgtatgctaaaatagataccataaatttaaaaagagaataaactatgtattgagaaaaatatttgttacacaaatgacagacgagattaacattgataaactatcatgaacgcctataaagtgccaaaaaagaaaaaaatattaattagacaaaacacagaaaacaaaacctcaaataaccagtaagaatatgtaaagatcctgaaatcacaagtagctagggaatacaaattacacaaaatgttacttttacccaaaatactggcaaaatacaaaggataatacccaatgctggaaagaatagggactattattctcactttggaaagtaatttggtaatacctaagagaatcaaaaatacacttatccttcaacttgtgcagtcccactggaggggctctgacctatagaaatgaaggcactaattctgggtgtccgggggtgtttactacagtattgtttatgttgtgtttggaaatagagaagagtgtgggaggtgaatgctaggattttacactgaaagaggtgcagatgagggggaagaagtaggctggagcaaattgaaagtgatgtctgctataattagttaagagaaaatatgaatgtaaggttcaatgtatgaagtttttttttttctttttctttttttttttttttttttagacagtcttgccctgttgcccaggctggaatgcaatggcatgaccttggctcactgcaacctctgcctcccagattcaatcaattctcctgcctcagcctcccgagtagctgagcctcccgccaccatgcctggctaattgttgtatttttagtagagacagggtttcaccgcgttggtcaggctggtcttgaactcctgaccttgtggtctgcccacttcagcctctcaaagtgctggaattacaggcgtgagctactgagcccagccacaaggtatgaagtttttctagacatgtaaaagtgagcatgcacttgggcaaaaacgagagtcatccaaaaatgaaaacataagatttaatttcaggatgggagtctatgtcatcttctatttgaattttctgttatttcctgagttccaacttttttccactccagataattcatactataatatttccataaacctggctcacagaataaaagtttgaaaaataagtttatttcaataatcattagaaaaattatagtcgggcacggtggctcatgccggtaatcccagcactttgggaggccgaggctggcagatcacgaggtcagggattcgagaccagctgatcaacatagtgaaaccccgactctactaaaagtacaaaaattagcagggcgtggtggtgcgcgcccataatcccagctactcaggaggctgaggaaggagaattgcttgaacctgggaggcagaggttgcagtgagccaagatcgcaccactgcactccagcctgggcgacagaacgagactctgtctcaaaaaaaaaaattatggaagtgaaaaattgtgcaaaaatgagtgtgtaccaactttctgtcagagcttcaccttaatcatctaataagaaagcaaacaaaagataaactgtataagcatgccaacaataatctttatttctgccatgttttaccctttaatattcagaagaaaagtcatacaggaggaaaattttataactatagtaaatatagacaacttgaacaacactagatctctactggccaaaaggaaaaaacaaaaaacaacccccagtatatccctaaatgtacaccagagaatcttaaaagataaaataatttggccaggcacggtggctcccgcctgtaatctcagcactttgggaggccgaggtgggcggatcacgaggtcaggagatcgagaccatcctggctaacacggtgaaattccatctgtactaaaaatacaaaaacaaaattagccaggcatagtggcgggggtctgtaatcccagctactccagaggctgaagcaggagagtggcatgaacccaggaggcggaacttgcagtgagcagagatcgcaccactgcactacagcctgggcaacaaagcaagactcaaaaaaaaaaataaaataattcatgtgattataataaatttgagaaaaacttcttttatagctcttgcctttctcaaagggggaggactcatcctggagagaaaccccatggatgtattcaacatggtaaatctttttgatggagctctcacctagttgcacatcacaacttataccagatagaaaatttatgaatgtaatcaatgtggaaagtttttcagcctggtgctcccaccttgttagacgtatactgaagactctgggaacatcgggaacgtcagagagctttcagcaggagatctcatctaattgggcaatagaaaactcatactgaagaaaaacaattccatgtaatcaatgtgagaaatatttcagtgacatccttgattttaattggcatcagggaaagtgtaatagagagaagccttatgaatgtagtcaaggtaggaaatctttctatacagctctggccttgttgcacataaaataactcatactggaaagaagcttcgtgactgtaatcagtgttggaaatggttcagttagagttctcacttgttgctcatcagataaatcataccggtgagaaactgcgagtgtcctgagtgtaggaaatcagctggagctgattacttatatggcatcagagatttcacattagagagaaacctcatgaatgtcactggtgtggaaaatcccgcagcaagaattctcaccttattgaacagcaaataactcattctggagagaagcctataaatgtagtcaacgtggaaaaactttcagacagaattattattgtgtatgcaccaaaaaattcatatgggcaaaagccaacatgaatgtctaaatgtgaaaaagccttcaggagactatctgaccttatggaacaccagatcattcataatagagagaaactgtatgcatataatcagtgcagaaaggcctttcaggcagcattctaatcatgtcaggcaccagataactcattcttgagtcaaactgttaatgaactttttatttattttattttatttttgagatggagtctcgctctgttgcccaggctggagtgcagtggcgtgatctcggctcactgcaagctccgcctcctgggttcacgtcattctcctgcctcagcctcccaagtagctgggactacaggtgcccgccaccatgcccggctaattttttgtattttttttttgagatggagtctccctgttgcccaggctggagtgtggtgacacaatctcagctcactgcaacctccacctcccgggttcaagctattctcctgcctcagcctcccgagtagcagggattacagacacacaccaccatgcccagctaatttttttgtatttttagtagagacggggtttcaccatgatggccaagctggttttgaactcctgacctcaagtgatccgcccgcctcggcctcccaaagtgctaggattacaggcgtgagccaccgtgcccggcctaattttttgtattttttagtggcgacggggtttcaccatgttagccaggatggtctcgatcttctgacctcgtgatccacctgccttggcctcccaaagtgctgggattacaggcgtgagcgaccgcacctggccaatgaactttttaaattgagacagggtttcactctgtcatccaggctggagtatagtggcaagatcatcactccctgcagcctcaacctcttggtctcaagtgatcttccaacctcagcctcccaaagttctggggttacaggtgtgaggcattgtgcccagccataacttttaaaagattttcttcccttttatttagacatcaaggtaaaagtaactttttttttttttttttttgagtcagaggcaggctggaggagtgcagtggcaccatctcggctcactgcaacctccacctcctgggctcaagccattctcctgtctcagcctcctgagtagctgggattacaggtgcccaccaccacacctggctagtttttgtatttttagtagagacagggtttcgccatgttggccaggctgaccttgcactcatgacctcaggtgattcacctgtctcagcctcccaaagtgctggaattacaggcataagccactgtgcccagccaaaggtaacatttttaatgtaacaatatatggtcattctttgctcttatgacacaatcctacaaaaggcgatcactaagcttaagcactaagcctaaaactgaataatataaacactgatgtagggaaagttgttcctcagacgactccattattgatacagacatggaaacagtaaacagaaatgtaacatcaaagttcttatttacttgaactttttttttttttgagacggagtctccctctgttgcccaggctagagtgcagtggcgtgatcttggctcactgcaagctccgcctcctgggttcagggccattctcctgcctcagcctcccaaggagctgggactacaggctcccgccaccacgcccggctaattttttgtattttttgtagagacggggtttcaccatgttaaccaggatggtctcgatctcctgacttcgtgatcggcctgcctcagcctcccaaagtgctgggattacaggcgtgagccaccactcctggcctgaaattttctataataaaaacaaacaagatcatttattatctcataatgaaaagtccctgaggtgagcataggcaatgttgattcagtggcacaaagaggattcattccatcatggatactggttctttccatttttctgctgtgccattctcagcatgttgcctttacctcctggggtggcttcctcatggtgccagtgtgcttgtaattgtcctacacatcacatacagacatcacggtccaggggcaaaagaagacacattgctatcttatgtccacttttaagactgagggaaccggccgggagcggtggctcatgcctgtaatgccagcactttgggaggccgaggcgggtggatcatgaggtcaggagatcgagaccatcctggctaacagggagaaacaccgtctctactaaaaaagaaaaattacaaaaaattagccgggcgtggtggcgggcgcctgtagtcccagctactcgggaggctgaggcaggagaaaggcgtgaacccggaaggcggagagtgccgtgggcctagatcgtaccactgcactccagcctggtggacagagcgagactccgtctcacaaaaaaaaaaaaaaaaaaaaaaaaaaaaaaagactgagggaaccttcccaggaaacccctagcagccttatttctccttggccagaatatccttgcctaattcacacagcaagaagcttgagtccattctgattagcttagaatccatcaagatcctcccttagggagttagattctagatttcccggaagaatctaaaaattgcagggtcgtgctagccaggtatgaaaataagcaagtaaaaagatgatgactgttgggtaaagctatcgacaaggtcagctacaaaacagtcaagccaaggaaggctagtcacagatgcaccccagacacaaaagcacagtccaggagctgagggtgcctgagccacagtggttcccgcctacctggccttcgtaggaaagtttcctgtggtctccctcattgaagagccaggacgggtcaggcggtggtgggtctcagacattgagccccacaacgcactgagactgaacatcagaccatttataataacagaactctgtcccacaacttctgcagcaataggtacaaaacagaacttggtcactgccagcctccctatttttttccctgtcccacttaggagctaccacagaaagccaaataggctcgactgagcgatcacctaggacgaatcgcctccagttagcgtgcttccaccttccactcggaatgctccaagcagggcactcccggggctttgtttctatcactaggacgcgtccccacgcccaggctgtccctgagtccctgccacaggcgcagatgttggcgggcgcccttgcccctgagctcccggttaacggccttggactgttctcatggctcagtcttggtctctctccccagcagggcaaggcgccgggaaggcacccgagatgacagcgccgagccccataggcgctagtcccgccctggacgccgaccgccgcctccacagtctcggcttcggttgctggatgagaaccagcgtggcccgtttaagggggaggggacaggcgctgcaaggagcagagccgcgggaagcaactccctaagccacaatgctagtcgcgaacacaggaaaaagctcatcccgccgccgcggggccccatgctcccgccggcaatgactatgcctgtgggagcaacggctaccggcgcgcggccttctgggagttgtttgttgcgcggagcgcgggcacgtccgccggccaccggaagcaccgccattggccggtgcgtgcaggtgagtctggcggcctcaaggttggctcggaggtttcactgttagccgggtgcggccggagcgcaggaccaggccagagccgccccaagtgatctgggcgtgccggagaaacgagcagggcctgcgggggtccctcatgcggcgaggccgagcaagggcaggggcctgatgggatcgggatctctccggcctcagggacggggaaggccggtccagtcaggtttcccctgcaggagcgcccggctgggtctgagcttgtcgggaggctctcctgctgcagagctgggagggaacttatagtacctcgcaggtacgggcaggggtggaactgggtgggactgggtgggactgggtgggactgggtgggactgggtgggccctcccgacagagggtgcctgggtcgagggctgcaggggcgggggattcaggctggcgtctggagctctggggctgccgacccagcgggcctctcccggctcctttttcctccctcaactcatcttctgcggcttatccacaggtggcagccaagagcctcctggcacagcggcaccaggcaggtgacgcctattggaccccagaggtcatcccagctccagacgtggacacattttcttccaatggtacgtgaagcttgaaccttgcagagaacatgtgtattttccaagtgaacagaagattaaggccagtccacgcagggcaggggtaactggggtgttgggggcctgcactggttaagcgatgctggtgcaccccatagagagactacagaggtgaacaggatgggatgtgtatgtaacgcctgtaagttagggatcggggttccatttgtgttgggtgatatttgatggggaccgtacaaggcagtgctaatgaggaaggcatggggttggatttcaagagtctaagggagtagggaaacatctgattgtggaaatgactccgtgtaaggagggatgccaaaagacaggaaggagtggaggaagactgtgtttctgtttccagcgtggagccagggtagaagtcacagtgcaaggaagatgtggtatgcctggtcagtctctgcatgggagttgaggagcatgtgggtgacatggctgaatgtggaggagggaatggcagtggcaggaagcccaggaggtttgggctggacacgtaacctggagcagattggaaacgtcaccccacaagcagggaaggagaaaactggaaaaggaaagagaaagcaactccctccccagccctgcagccagagggacttctgccagatcagccaccatacaggtccagtatgaggaacagatggggaattttatgtccaagtataatcactatgaatacatgtgttgtgccccttttgcaggttaacacaatgttaagctctgtaaatgcaactcaattaattcttttagcatcctcacaaggcaggtcttgctgtttttccagatgtctacggatgaggaaactgaggcctggagaggttaaagagacccgttcagagtcctacagtggcaggtaatggagccagtactttgacagcaggttgcaaagtgagtgttctcagccgttgcccttggatgcctccagacaaggaaggacagggttagagagcaaagatggacacaggcagtgagagattccccagggaaggccaggagcatcaggacaagatagtaacacataagatattgggcagacctcttggatgtggtctacatttgtgtttgtgtgtgtgtttgggagtgagagagcagagcaggatgggcaagatgaggagggggaaactgagagtgttggtcactctgttcaggcctcacctgagaggagaagaggcagggggtggggcactgggatatggattcatcttgaccagggagaagacatctcagctcagaatttgaagggagctactaatgagtgcaggcctgcaggagtttgtgtgccaggaggttgaaagagtccagagtcatcccttggagtgaattaaaaggccgatttgtctgcacagagaggacagtggtgggaggggactgaagtagggtgtgagagcatgagctcgcagctgtaaggggatagtgactgagtggatactggtgttcctgaactcctataccacccagaactcagaaactagcagggttgggcagagagggcagtcaagggcataggcagattgcacagaacaaacagatcagagaggccaagaggtgggcctcaggccaaggatgttaagaaaaagaacaggggcattgggctgggctggggtggggtgtaccagacggggaggctgggagcctgagtggtagtgtgcttagggccatgagctatggagctcccaccttctcactccccagccacgaggcctcagttaaattttactcaagttctttctgccttggtttcctcatttagaaagcagggtaaattctgttaattgtctttgtggggttacaaggaagatcaaatgcatgaattcaggcagaggacagggtacagtgcctggcctgtaggaagtacagcctgagtggtcagtggattttgaaaggtaggaaggcctggggcatttgctagggaaggaagctgagatcataggccccggtgtgttttaattcatgtctttattatttatttttttataaatggggtctcacatgttgcccaggcttgtctcgaacttctagcctcaagagagcctcctgccttggcctcacaaagtgctgggattatatgtctttaatacagagcagctttgtacatttttcagccatgtagtttattttattgtgaactatctgtttgtgactgtcacctctctttttcgtaggtctctattttcattaaagaagcttaaatattttgtcaagttcaaaaaatagtcctggtgtgttttttgttttgttttgtttttttcttgagacaaggtcttgctctgtcacctaggctggaatggtggcatgacctcggctcactgcagtctccgcctcctgggttcaagcgattcttgtgcctcagcctcccaagttactgggattacagatgtgtgccgccacgcccagctaattttttttttttttagtatagacagggtttctccatgttgtccaggctggtcttgaacttgaaaactaatacaaaatataatatgtaatgccagaaataagactagttctcacagtaaatgtgatgggtagaactctgttttagtagacactttgaaattgaactgaaaataaaaagttaaagatacgctctacttagaagagtcagatgatccaggctttgacaaacaggtggtgggatgagcatagatccatcagtgaaaacaaataaggaaatgggtggcaagataatatcagataaagtagacctttagtgcaacagcattaagacaattttatctttttttttttttttttttttttgagacagggtctcactctgtcacccagactggagtgcagtgatgccatcacagctcactgcagccttgacctcccggctcaagtgatcctcccacctcagccttctcagtagctgggactacaagtgtacaccactacacccagctaactttttgatttttttgtagagacttggtctcacttagttgtccaagctagtctccaacttctaggctcaagcagtcttcctgctttgacctctgtattagtctgttctcatgctaataaagacatatccgggccgggcgcggtggctcacgcctgtaatcccagcactttgggaggccgaggcggccggatcacaaggtcaggagattgagaccatcctggctaacatggggaaaccccgtctctactaaaaaaaaaaaaaaaaaaaaaaatacaaaaaattagctgggcgtgatggcgggagcctgtagtcccagctactctggaggctgaggcaggagaatggcatgaacctgggaggcggagcttgcagtgagccgagatcgtgccactgcactccagcctgggcgacagagagagactccatctcaaaaaaaaaaaaaaaaaaaaaaagacatacccaagactgggtaatttataaaggaaagaggtttaattgactcacagttccacatagctggggaggtctcacaatcatggcggaaggcgaaggagaagcaaagtcacaccttgcatggcagcaggcaagagggtgtgtgcaggggagctcctctttgtaaaagcgtcagatctcgtgaaactgtcataagaacagcaaggaaaagacctgcccccatgactcagttaccttccactgagtccctcccacaacatgacacgtgggaattatgggagctacaattcaagaggagatataggtggggacactgccaaccacatcagcctccaaaagtgctgggattacaggcatgattacaggattaaggcctggccttatcacctctttagtgataaaaggctataggaacaagatacattaatcttgaatgtttatggaccagacaccatagcatagatataaagcaaaaattgtgtacttaaaggaaatatgagaaggactatatgagaaacttcaacacatgtcttagaatttgatcaggaagacaaaatagagtataataaattattttaagtatggtgtcaaggtaggttatagatttatctacacacttctgtctgtaatatattctgcccacagaaaatttaaagacccagattttcttctgtgtacacaaggcccctcctatattagatctgtaaatcattgaattcccttggtcctgagtcctgttccctctctgtaacttgattgttcctgtttagtttaagtgctgctgagtctcatggacttaaatatctttactgtggtgccccagtatcttctctgggcttcaggctggcaaacgtaactgcctgtgtaacattcccacttggaaattgtgtccagccttaacatgtcttgattcccctcctcctacttgttcactctgggaaaagatataaactttcccaagttcttgaatctagaaagagatgtcattatttagcctccactcccaattctattgcataactgattatacttccaatgtaaagaatgaatctgcccacttctctccattttgctgtcccttgagtcctggcctttggtgatagccacttcttctcctcattccacctttactccccacagtccactctccagcctgccaacatctacataagcccagcaatgccttctctctctctgagatagaatctaaacttgtatgggactttctctagctgtggcccttgcctttctctatgctcaggtcacgggatgggccagggtcgttccagtctctggggtgaggtttccaatctgcctcagcttctgcctgtgcattggggtgcctcccttcccttaacctcatcttgtgggcctagaactgttgtctttccttgatcccatgctgactgcacttcattgttgttgcctgtttgctcatgtggcctccctgctacctgggaaaaggccccacaggccagggttgtgcccttgctgggtctgggtcccacttacatccctggcctggagcctggcacttggagtgagcccagagttaatcatcgttgatggtgacactgctgcttttcctctcttactgtgttaggatagctcaaggagcagttcttccctttgcctgtgtacctgcgtgcagcattctgcgagctgtctggcaattctgcttttgaatatttaacctaaacatacacatgcagaaagggaggcatgtatgaaagcaagagtggccattatagggctgatgtgagggtgaaatttggaaaactcctaaatattcagaaacattaaactctttaaagctgggactattaataaactacagtccattcatcaaattcagctattacagtgattacagctattacaaaaattgtttattggcattgggagatactttacaatgctaagtttcaaaagagtgtttacattataatcacatttttctagaaatgcattatggtgattagtgaacatgtgtgtattgacacaggaagatttctctctctttttgttgttttttgtttgtttgttttaaggaagatttctcaaaggacatgcagttaccagtccataataatggggatatgttccgaaatgtgtcgttaggtgactttgttgtgtgaacatcatcagtgtgcttacacagacctacatggttatagtctaatacacatacaagttatgtggtacagcctcttgctgctaggctgcaaagctacacagcgtgttattgtagtgaatactattggcaactataacacaatggtgagaatttgtatatgtaaatatatctaaacatagaaaaggtacggtaaaaatatggtataaaagataaaaaatggcccacctgtatagggtagctccattgtaatcatatgggaccactatcatatctgcggtctgtcactgaccagaacgtcattatggggcacatgacggtaggcacaaaatagtaacagtggctgtctcttaagatgttggattatttattattgttacttttagctatttacatctttgactttttatgcaattaacctaaaatgtgtgtgatttatacatcgtggtggctatagttaataatctcttatatgcttgaaaattgctaagaaagtaaaatattcccaccacaaaaaagtatgtgaatgcatatgttaattacctcaatttagccattctatagtgcatatgtatttctaaatatattgtacatgacaaatatatacagtttgtatttgtcaattaaaaaataaattaactttaaaatttgtgtgattaaaaaacaacttcataggccgggcttgatggctcatgcctgtaatctcagcactttgggaggctgaggcaggtggatcacttgaggtcgggagtttgagaccagcctgaccaacatggagaaaccctgtctctactagaaatacaaaattagccagacatggtggcacatgcctgtaatcccagctactcgggaggctgaggcaggagaatcgcttgaacccaggaggtggaggttgcagtgagccgagatcatgccattgcactccagcctgggtaacaagagtgaaactctgtctcaaaaaaaaaacaaaaaaacaacttcatgtctgggcatagtggctcatgcctgtaatcccagcactttgggaggccaaggcaggtggattgcttgagcccaagagtttgagaccagcctgggcaacatgatgaaaccccatctctattttgaaaacagaaacagccaggcacggtgactcacgcaatgctagcactttgggaggccgaggcgggcagatcacctgaggtcgggagttcaagaccagcctaaccaacatggagaaaccccgtctctgcttaaaatacaaaattagccagggtggtggcgcatacctgtaatcccagctactcggaggctgaggcaggagaatcgcttgaaccctggaggcggaggttgcagtgagccgagatcgcttggcgccattgcactccagcctgggcaacaagagtgaaactgtgtctcaaaaaaaaaaaaaaagaaagaaaacagaaacaaacaaacaaaaagccatcattttgagatatatacttataggaagctgcaaaatagtacagagtatcttgtgtgcccttcacccagcttttccagagagtgacatctttcacaagccagacattgacatcgatacatattgttacttagactgtagaccttatttagcatttttaagcctccatttgtgtgtatgtatcattctgtgaaactttttttttttttttaagacagagtctctctccattgcccaggctggagtgcagtggcgggatctcagctcactgcaacctccattccccgggttcaaacaattctcgtgcctcagcctcccaagtagctgagactacaggtgcgcgccaccatgcccagctaattttttgtatttttagtagacagggtttcaccatgttaaccaggctggtcttgatctcctgacctcaagtgatccacacgcctcggccttcctaagtgctgggattacggaagtgagccaccacacctggcctcattctatgaaactttttacctttttttttttttttttccccacatagggttttactctgtcacccaggctggagtgcagcggtgtgatcttggctcactgcagcgtctgttcccaggctccagcaatcttcccgcctcagcctcccaggtagctgggactacaggtgtgcgccaccacacctggctaatttttgtattttttgtagagacggggttttgccatgttgcctaggcttgtcttgatctcctcggctcaagcagtccgcctgcctctgctgcccagagtttacaggtatgagccaccacgcctggcctcaagcttctgttcatcttaagccaacaattttgtggaaattggttacaggggccacaagacactgagccgctccaggccggcagcttgctggtcctggcagcctctgcgagtgctgtggctctgatttcatcttggggcctagtgttaggcacagcctggcctggagggcggctcacctcacgggctgacggagccagacccttgccccgccagcggtccgaggggcccttccagctacaggtaggaccctcacacccaccttctttttgctttttttccccactcatccatggagacttccaagctgctttttatcttccctgtcttcctcatattttccttttgtgtcttaaatgctgttggagtgcagcagacaccccagtgtgtgacctgtgccagaagcctggagctttgttggcatggccagtattcggcatggaggcagggcctggggaggcagcaaggtgcggagccacccgaggatagagaagcctgaaaatgcgtctggaggtggggtgttgtggggccggggagctggaaggtgttccatgagactgacagacgtcacaaggtctgtggggagtgtctggagatttttaaaacttctcttgttgctcagactggagtgcaatggcacgatctcagctcactgcaacctctgcctcctgggttcaagtgattctcctgcctcagcctcctgagtagctgggattacagacgtgcaccaccacgcccggctaattttgtatttttggtagagacggggtttcaccatgttggtcaggctggtcttgaactcctgacctcaggtgatccaccagccttggcctcccagagtgctgggattacaggtgtgagttaccacgcctggctgagatttttaatctgggaagggatatctggagattgtggaggaatttgggctttctcctaagggcagcgaaaagctggcactccacagggttctgtgacacaggcttcattctgtggtgtccctgcggcttcctgggagagaggagaaaagtcaaaggcaggaccccatcaaacccaccgtggtaacccgcacaagaaacagtggctgagccaggcatggggcaggcttgtggagcggtgcatagtgcctggaagacggggacacagggttttggctgaatgtgaggagagcacgcaggaggcgtcaggaaggacttcccctctcactgctcagtacacgtgtgagcatcgatgtcacaggcttccaggcagaggagtgcgtacgtgagggtctgctgtgcgctcagtacagagtgggtgtgggtttctggctcaggagcctcccgttgttgtcacttctcctcctctgtctctggtcctcccacctccctcattgtagggatcattgtggtgaccccaacagtctccccatctaaagatcctcaacgtgggtctttcctttccatgtagggtcacatattcacaggttgtagggattaggatatggccatcattcaacccactaagtcacggtaaaaaaaaaaaaaaaattacaatgccctgatcagcatgcaaagggacaggcagaacagggaggggacacaggacacaggtttggtggcatcagggtgagtttcttctccttgtgcaggggaggcaagagtgttcagcatttgctgttagtgtgtcctgactggcctctgagttctccttcgcgttcaggaagagaaggtggtgaaaataaacagggctgggtgctctgtggctgcaggttttcttcacatctgctgatgtgtgaggttggcctcaggcttaagagtcctgtgcctgacacaggcttgcccgcaaggttcttcctccctgtaaagccatttctcagctcagcacagtcagcatttggggccagatcatcctctagggctgccccatgagctgtagaatgttttacaccttcctggcctctgcccaccagattgcagccagtagctgtccccttctacacctcttcccccctccactcccaccaaactctggaaactgtcttcaaacatggccaatgttcccggaaagcaaaactgcccccagttgaggacctctgctgtgaagaaatggcccacttttcttgaaattcctgaaggcctgtttctttaagtaagcctggtgttcactgtgtgcgggtccttgagaccattctcaggttgaccagatggactcagaactctgaaaagctcttatattcacagttacagtttagtacattgaaaagatacagattaaaattacaaggccaggcatggtggctcatgcctataatcccagcactttgggaggccggggtgggcggatcgcccgaggtcaggagtttgagcccagcctggccaacatggtaaaaccccgtctttactaaaaatacaaaaattagccaggtgtggtggcttgcacttgtagtcccagttacttgggaggctgagacaggagaatcgcttgaacccaggagactgaggttgcagtgacccaagattgcgccactacactccagcctgggcaacagagcaagactccatctcaaaaaaaaaaaaaaaattacagtggtcaaaggcacgcatgtaaacgggagtccgggagagaccaggaccagcattcagctcattcagctcccagtggagttgcgtagacagtgcttaattctccaaacgaccatgtggaccaggaagctcacccaagccttggtgcttaggtttctttattgagggatgtgttatgtaggcatggagcctatataaattactttggttactcaggccctccagagatccccctaatacaccatggcccagtgcccctggcaggcagagacattttaacaggcgggatatcccaagggctcagaggttacagccagtcaaggatcagacctttctttttctttctttttttttttttggagacagagttttgctctgtcgcccaggctggagtgcagtggcctgatctctgctcactgcaagctccgcctcccgggttcacgccattctcctgcctcaacttcccgagtagctggcactacaggcacccaccaccacgcccgtctaattttttgtatttttagtagagatggggtttcatcatgttagccaggatggtctctatctcctgacctcgtgatctgcacacctcagcctcccaaagtgctgggattataggcatgacttgaggtcaggagtttgagaccagcctggacaacatcctgaaaccccgcttctgcttaaaaaatacaaaaattagctgggcattgtgatgcgcgcctgtgatcccagctactcaagaggctgaggcaggagaatcgcttgaacctgggaggcggaggttgcagtgagctgagatcgtgctaccacactccagcctgggcaacagagtgaaactccatctcaaaaaaaaaaagaaagtacagggtgtggacaacccaggcttactaaaccagccctgcacattccctgtaatgtgtgtgtgatgtggcagtgtgaacattccagtatcatggaatgatgggtttagcatttacctttttggggtaggggtcatttttttctttttctttttctccttctgtttctctttctccttctcttttcttttctttttgttattgttgttgtttgagacagggtctcattctgtcaccgaggctggagtgtggtggcacgatcactactcactgcaatctcaacctcctgggctcaagcaatcatcctgcctcagtctctcaagaacttgggaccacaggcatgcaccaccatggccagccaatttaaaatatatatatatatttaaatatatatatatatatatttttttttttttgtagagatagggtctcactgtgttgcccaggcagttctcgaactcctgggctcaaacgatgcttccgccttggcctcccaaaatgttgggattacaggcgtgagccaatgtgcctggcccactttgttcttttgagtaagtttaatgttgggagtcaggtaaatgtgtacatacaccaactctgtcttgcaagttgaatattttgtcataacttatgttatactttaaaccttttttggtagggtgtgaatgcctcctccccaaacttgtcatctgatagcaattctaatcattcacattccatttctttttttttttttttgaggtggagtctcgctctgtcacccaggctggagtgcagtagtgcgatctcagctcactgcaagctccgcctcctgggttcacgctattttcctgcttcggcctcctgagtagctgggactacaggcgcccgccaccacaccggctaatttttttgtattttttagtagagacagggtttcaccgtgttagccaagatggtctcgacctcctgacctcgtgatccgcccgcctcggcctcccaaagtgctgggattataggcatgagccaccacgcccagcctacattccatgtcttttgtgtatgttggtgccttgtctgtcctccccctggcactgaggtcgcatgcagttcttggcattgcgttgtctttgtcttctgtttcagcactgaatttgctgttcacttctctctctctctctctctctctttgtgcttgttcttggaggacttgagtgcttgatttgcctgaagaatgttatgtgtctgttcagaagagagattaggacctgcgaagctcatgcctagaggggagagtattcctgcagaattcagcgtaggaaaggaggcctcaggcaccagaagtgtttgagagcaggagagttctcagaagagattgcctgggaaatgagagcatcgctggggtgaagtcccagcagctgcgagtgttgaggctgctgtgaggtggcccatgcttaggctctgtgttcctggccagagtgagtccccagcaccgcaacatctgcaggagatgatgctggtggaagaggtttcccaagcctttgaagggaaaggtgagaactgcctaaaaaatacagcacagagaaagcaagatttctgcaattcatggcttgatacttgatattccagggaatttttttttttttgtctgagactatggggcaagaaaaatgccagcgttcaaacctgggagaatgataagtgttcagcgtctgcaggggctgcctttatctgctcttctagcccaaatgggagttgtttcgcttttttttttttgagacagggtcttgctctgttgcccaggctggagtccagtggtgtgatctcagctcactgcaaccttgacctctagggctcatgcgatcatctcatctcagcccctacccccaccagttgctgggacctcagaccatgcccggctaacgttttgtgttttctttgttttgttttgttttgttttgagacaatgtcttaccctgttgcccaggctggagtgcaggggtgcaatctcggctcactaaaacttcccgccccccgggttcaagggattctcctgcctcagccttctgggtagctgggattgcaggcacacgtcaccatgcctggctaatttttgtatttttagtagagacggtttcaccatcttggccaggctggtcttgaactcctgaccttgtgatctgcccgcctcagcctcccaaagtgctgggattacacgcgtgagccaccgcacctggctggctaacgtttttatagagaggggggtctcactttgttgcctaggctggtcttgaactcttggactcaagcagtctgcctgcttcagcctcccaaagtgttgggattcctggcctgagccaccatgctggcctttggggtcagagttcaaggctcttcatgaactagaaagcattgtgcaaatgaaaggcaccatcaggtcgagtgagcgtagtcatatgagcaaaggcagagatacaggatgcgcttctggaatgttcagtggtctcgagtaacctgttggtgcctgcagagggtgtgcttcagtgccgatgtggcgatgggagtcagatgtgtggaagggtttggtgccacattcaagagggtttttgccaaactctcggtaggacagtgatgtgactgctgcaaggggattagacaagcagaagatatgaagggtttggtgactgagttcagtagagagggtgacaggcatgccctggcagtaggcagcatcctggtacttccagctgagaccgagggagggcatccctgtacaacaccccctcccagagccgagggaagttccctgcgccgccctgctggggagtgtcacatcctccttgtccccacacccccattgtcatcatttctgaaaacagcttatgatccattgtgatatgctaaatgtacaattacttagacacctggcctccacctcccttccttagtcacgaaatgataggaaaaatgcccctccttgcccttgactgttgagggggctgctgcgtgtctggactcacagctgagacgcccagcacatgactgggcacatccccgagcctgaggtagcccaggtccccaggcgtgaggcccattcccgcacctgggaagccctgcttgtggccggccccgcgttctctagggtgggtgttggccctggaggtttgcaggagccgaggggctgaatctctgcttgttttccaccccagactggtcttctgaggacctctgccctctacacagcggcctcttcaggtgcagggaggaaatggaagcacgttctatgctggttccaccccaggtgagtggggggtctttgctctcagtgccttggtctccatagatgtaaaatgggtccaggaatagcacccgcccctgcaggctgtcacacaggagcgctccgcagtgctggccagtgcttcccagtgaaatgctccagctccctgcagtaaagcgcggcacccgtcaccagcatggacgagcctagagctccctgcactagacccagcgcaagtctcccatgcctgttccaccaggccaggtctgtgcttccgacattctgcttgtggttgctcctcaggcccttgagggtggatggagctagccccacaccccgacagccacactgggccctcaatcctcacggacacccctggctgggggagtgtccccttaaagcactgtagttacctacctgcagagtcccctgtaaatggtgagggccctctcttcctggcttgcagacagccgttgtccgactgtgtctttatgtagtgaggagagagagtgagagcacacatgccctttagtgtcttttcctcttcttattttattttttgacgtaggatctccctctattgcccaggctggagtgcagcggcatgatcttggctcacagcagccttgaactcctgggctcaagcgatcctcccacctcagcctctccagtatctgggactacaggcatgcaccagcatgcttgactaatttattatatttttagtggggacagggttttgccatgttgctcaggctggtctcaaactcctggactcaagagatgcttcagcctcggcctcccaaagtgctggaatcacaggcgtgagccaccatgcgcagcctcttcctcttcttataaggactctagtcctattggattagggtcccacccttgtgacttcatttaatcttaatcaccattttttttttttgaaacggagtctcgctctgttgcccaggctggagtgcagtggcacaatctcagctcactgcaactccgcctcctggtttcaagcaattctcctgcctcggcctcccaagtagctgggattacaggtgcccgccaccacacccagctaattttttgtagagatgggatttcaccatgttggccaggctggtttcgaactcctgacctcaagtaatccacccatctcggcctcccaaagtgttgggattacaggcatgaaccaccgcgcccgaccccctgtcaccttcttgaacagttcttaaacagttaaaattaatcaccttgtttgtggggttttttttttttttttcttttgagatggagtctcaccctgtcacccaggctggagtacaatggcgcgatctcagctcactgcaacctctgcctccaggttcaagcgattctcctgctgcagccaggaagagtagctgggattacaggcatgtgccaccatgcctggctaatttttgtatttttagtagagacggggtttcaccatgttggccaggctggtctcgaactcctgaccttgtgatctgcccgcctcggcctcccaaagtgctgggattacaggcgtgagccaccgtgcccggtcaatcaccttcttcaacagtcactttgggagttagggttcaacatgtgaattttgggaacacagtttattctatagcattagccttttgaaaacacaccacagccctgatttgtcctacaggctgcagttttcccaccccgatttagagtgtctttcttacctcatttcgaatctgtgatttttgtagagaggaagtgggtgaggatctcctagtggagttcctgtcatttccagtctagaaatcaggaccactgctgtgactggcaagaggtgagatgcccagaaaaggaatggtacagaccacatacatggagctgtcccagtccgtttgggttgctataataagataccttagagtgagcaatttacaaacaacagaattgactgctcatagttctggaggctggtaagtccaagatcaatgtgtcaacagagttggtctggttggggcctgctgtctcatagatggcacctcttacatgtcctcatatggtagaaggtgaacacaggctccctcaagcctcttttatgaggacattaattgccttgtaaagaccccacctcttaacactatctcactgggtattaggttccaatgtatgaattttacggggggacaccaacatttaggccttaacaggtacctccgtgagggcatgaggacctggggtctctgagcagtaacaagtgccctgtttcaggcatctgtgtgcttcgaggatgtggctatggcattcacacaggaggagtgggaacagctggacctggcccagaggacactgtaccgagaggtgacactggagacctgggagcatattgtctccctgggtaagtggctgtgctcatggaaggaggttctacccctaggactcaaagctgtaccaagttctgaagggtgttctgggatgtgctggaagatactggaagcaggtccctttcaggtgcagttcccaggggttgcccttcattctatctctgggacaggtttgtgacttgtagtcctaacagtggggagtttcctcgggacagcactaggggctgaagcttggacccaggacatggttcttggtgtccaagcagaggggcaagtcctttttccgtctttgaccagggcttttcctttccaaatctgatgtgatctctcagctggagcaagaagaggacctgtgcagggcagagcaggaggccccccgaggtaagagcagaccttgtggtgagcagctcaacgtttaacaagcttggacagagagctctccgcagggccccaggggccaaggagggagccttgtttggaggaagcctccttgggtgctctttgcagcagttcacccattcaaaggagttcaccaattcgaagtatgcagttcatggcttccagtgtcttccctgagtgtggaaccctcaccacaatcagttctagaacatgttcatcatcccaaccatttaggcctctttacttgatttgtttttttttaattaatgtatgtatttatttatttattttgagatagggttttactctgttgcccaggctgaagtgcagtggcgctgtcttggctcactatagcccccatctccctggctcaagcaattctcatgcgtcagcctccctagtagcttggactacaggtgcacactgccacacctggctaattcttttgtttttgtttttgttttttaagacggagtttcgctcttgttgcccagactggagtgcaatggcacaatctcggctcaccacaacctccacctcccaggttcaagtgattctcctgcctcagcctcccaagtagctgggattacaggcatgtccaccatgcccggctaattttttgtatttttagtggagacagagtttcaccgtgttagccaggatggtcttgatctcctgacctcatgatccgcccgcctcagcctcccaaagtgctgagattacaggtgtgagccatcacgcctggccctaattttgtatttttattagaggtggggtttctccatgttggtcaggctggtctcgaactcccgacctcaggtgatccacctgcctcagcctcccaaagtgccgggattacaggtatgagccactgcacctggccattaatttttgtatttttaatggagatagggtttcatcatgttgcccaggctaatagactttattttttagagcagttttaggtttataggtaagttgacgagaaagtgcagagttcccacccatgtctgctgtcctacagacacatgcagtgtctcctgctgttaacaacttggatttgtattgtacatctgttacaatcggcaaacctatcttgaggcatcctttttttttttcccagacagagtctcactctgtcaccaggctggcgtacagtggtgtgatctcagctcactgcaacctccgccccccaggttcaagtgattttcctgcctcaacctcccaactaactgggactacaggcacgcaccaccacgcccagctaatttttgtatttttagtagagtcagagtttcaccatgttggccaggatggtctcgatctcctgacctcatgatgcgcccccctcagcctcccaaagtgctgggattacaggcgtgagccactaccccttgcccttgaggcatcattatcacccaaagtccatagtttatgatagggttcatgcttttttttttctttttttttttttttttttgagacagtgatgcagtcatagcttaagccttctgggcttaagtgatcctcccacctctctgcaccccagcctcaggtgccacagcatgcaccaccatgcctggctaatgtaaaaattttttgtagagatggagtgtcactgtgttgcccaggcttgtcttgaactcctgggctcaagtgatcctcccacctcagcctcccaaagtgctgggattacatgtatgagccactgcacctggccaggcttcactcctgatgttgtatattctgtgcatttggacaaatgtacaatgtcatgtatccaccattatagtatcagacagagtagttccactaccctaaatattctctgtgctctacccattcatccctccctcatccccagcccctggtgttactggtggaggatgtgcaggttcttggcattttgaacaaagaattggacaaaatgcataaaacaatgaaagaatgaagcaaaaaaagcatagatttatcaaaatgaaagtacactccacacaatgggagtggtctggagcaagcagctcaagagcactggttacagaattttctggggtttaaatcccgagaggtttcccattggttacttggtttatatcctctgtaaatgaagtagtggcccataactagtctgattggttggggaaggtgaccaacagaggctgaagtgaagttacaaagttacacctctatgcagatgaaaactaggccagtgaccagtctcattggttgcaggaagaggtactttccatttttcatctgcgacacagaaggcgggggttgcctctgatccttttgttatttggggcatggaaagtttgggttttccttttgattcagttccaggaagtcagcattaatcacccttaggtttcttgcctccataccctgttctcatacctcatttccccccgaaagacatgatcctcataaatctttatgggaggtaaagggattgatagtctttcttctgtaactgctttatgctgacctgaggcacagtccctacgtactggggaatcacaggactctctccccgccctgtctagtggagacaggatagcttcttgatggccaggggtggtgtctccacctggaactggctggaaacattgtcacatgatcatctgaagcttgatggtctctaggtgacaggaaatgaatttggttaagagtttaacaaacatggtccaaaaaccaaggcaagtatagtcattactaatgggctggccagaggaaggagccatgaaccccaacttagcatttttgaccaggagccccatgactcagatagctgttgttgtattttagaggcccagttgggtagtttttgggtggcatttgttactaatcctcattgttcggcataaaaacagcattcttcctctagaaaaagacctaagcccccctttacagcagttaggagatctcatccccttctgttttgccaagcaactgctgctgaggcatctatttgatttcgtatggtgatgatactttggccaatgtctctattttttcttttttactttgggcaatgtcattcaagctttccataaaatccttggaaaagcattggtaataggatagggatgttacaacccggctgactcccattcccagtcccgcggttatttgtagtcctaccaaaagggatgtgagttggatggttcatttgtgtctggcaattgcagttaaaggtataatgagggattggttcttgggagctatattaatttcacaggctaaataaacaagtgtaaaggttctagtccaattggctggtaaacataagtaagaactagttccacacaggtaaaaggctcctagtttttcaagacaagaattttctatggtaaacatgtgggttagcttgttgttttcactttcccaagtggttaaggtccctatgaaggtggccccagttaaaggctggaaaggaccttgggaaatattctgagttgccccagcagttctgttttcccattggaggtaattaggcttagtgtctaccaacaagcatccagaggtgtttcgtactggggaaccaaaagataactagatgtctgaggattagtgcagtcttcccaagggaaaatatgatcatagctagtgggcttaccttggcagtacttagactgtgtatcctttgaagtgtccttatctagggatggtttccatgaaaaccatacaggttttctaaatgacacagtctgggtaactgcctagcttatgtaatcatgtgaggggttaataatctctagggtgtagttacactgatgacttttcaaggttcccagggcctgaccaaaattttggcttctcttaatacaaagtggcacctggaattttagctctgtgtacattgatattgggccccaaatgggtttctgtgggatgcaaccccagaaagggtactctgatagtactggagaaggtttactgcttgtcctgtcatcgtagttcatgtttttttccccaaggccaaagattgggctgggattggggtggtagtgtatttgaatgatgctggagataaccaaagccaacagtctttgccagagctgggctggtggtatttaactgtctttgagttaaatgtaaagtttttaataaatacccagaatccattaactgctggaggggtaaagtgaagctctgttgtaaaataaagctgattcccattatgcgtggtcctgtatacacaggctgtgggtgaccattatggaaccaaaaaatacttatttgttattttgtgctatagaataggaacttcaggggtggatacctatgctgtcaggaatgcttgttataagaattaattaaaacactttgcttaattattacaaaggaagttattccatttgtttagaagaaagcaattaaattgtagaagtataacaatggctactattatccagtttaaagtaactaagcaacaaagacaccaaggaaagttggtaggcttttacttatcttttggctgtcttttaaacaggtacttcaggtctttcacaagtcacaggtgtagtggctgatgggagcttcaggttcccggtctgggacttcacataacacaggcttgacaccagaaagatgtatccaactatctaatcctagtactttgaccccagaaggcatggccagtactgaaaatggtcccttccactttgattgtaattattgagcaggtgatccctccttctatgttttaacaggtaccttgtctgttggcctgattttgggttggtggttagttcctggtgtggggagcttttgagttccaaactcttgtaaagcctgctgaaataatcccaggttaactaggtattttactaaactggatgtttctggatcagagattagatcattagttaaaaatggccttttgtataacatttgtgtgggctcataataattttttctctaggggaattatggattcttaagagggctatgggcagtaagcagatccaagtttctgatgtttcctgacataggaactcctattttagagttagctaagctctttccacttttttggaggattgaggtctccatgctgaatgtaaataatagttgattctgagaaccttagcaaccccttgagttatttgggagacaaaagatgggctgttatcactttggaggctttgaggtaacccaaaccaggggattatttcctttaagagaacctttataacttcattaaacttctctgttctggtagggtacacttcaacccagccaataaaggtgtctgttagtactggcagaaacttttatcctttgcaagctggcatatcagtgaggtctaattgccagtcttcccctttaactttagccaatatattcacacacagaatcccttctacaattaatttttcataaaccttctacagcttgtcttttaaccctccaaactttggcaagaaatccatattctcatgccttttaccaaaagtacattctactttttttacatgaatccttttcacgacttacacagaccttctatgacatgcctggactttctgacttgtcctaaacatccctctttaaacaaccattcatttaactttagggcaagaatttaccatacaggatcctgtctcatacaaaattattattgctacatccttccctaccaagaatacatcttcatatacataactttcttcacctctctctcccgtacttactggtttcttactaccttgtttcataaataacccttttttttaagtcaacaacctgaatcaacctttagacaacctctgaactacacaaaatcatttctttcttaccaatagcacatcttttttggcaccttttgtatacagaatcatttgttaactagaattcttatccttagtaaccttaaattttagtgaaaccctaaaaagcaagaaatcctgaactattagatatgagcattttatagatgagaagaattccacaacttttagaaacatatttccccgtatcataatccttcctttttatttacttattatcattatgtttttgagacggagtcttgctctgtcaccaggctagagtgcagtggcacaatctcggctcactgcaacctctgactccctggttcaagcaattctccagcctcaacctcccgagtagctgggattacaggcacgtgccgccacacccagctcacttttatatttttagtagagacagggtttcaccatgttggccaggatgggctcgatttcctgaccttgtgatccacccaccttggcctcccaaagtgctgggattataggcgtgagccaccgcacccaacccataatcctttcttaattggaaatgacccagatatccaatgaacatcaaaaacaattttaagattttaagttacacaaagagtttacctaaaacatttatcccaatttcatttactcaattctttcattttaacattttatctagattacttctgaaaactaagatagtagacaccatcctctaaagttatttccttgttagccatttttttattaccaatgaatatcatttgctcactgaaaaaaagcctcaaagttaaatacacaggtatttttgccaataactcagaagattcagctaacaacattaaattagtctgatttgtttatttattttttgagacagagccttgctcttttgcccaggctggagtacagaggcacaatctcagctcactgcaaccttcatctcctgggttcaagtgattctcctgcatcagcctcctgagtagctgggacaacaggcatgcaccaccacatccagttaattttttttatttttagtagagatgggttttcactgtgttagccaagctggtctcgaactcctgacctcgggtgatctgcccaccttggcctcccaaagtgctgggattgcaggcactagccaccatgcccggccaaactagtctcatttgtcaaagaaagcatacaaaccaggaccattttttgttttggctgggttaatacctttataaccttctgtgccaaacactgacaccttaaaatatcttgcaaagacaaatataaaaccatatatgttgacaattctgaagacatttctattttcattttaccaataattttaaagccaacttctttagtaaagatttacttaagtcggctgggtgcggtggctcacgcctgtaatcccaggcaggcggatcacgaggtcaggagatcaagaccatcctggctaacatggtgaaaccccatctctactaaaaatacaaaaaattagccaggcctggtggcgggcacctgtagtcccagctacttgagaggctgaggcaggagaatggcgtgaacccgggaggcatagcttgcagtaagctgatatcacgacactgcactccagcctgggtgacagaacgagactccatctcaaaaaaaaaaaggaacagcagcacaaatgcctggatacatgcaactccatctcactttcccattcaacagcaaactccagattccaaacaatgttggggccaaacagtattgcaaaagaatatcaagtgtttcctccttagattatcagggtcaaatttattccagtcgttgaggatgcagccaagcagggagtcagatggaatagatggagtgtttcctattattgtctgtaagagagaaaatcctagggagggtgtagtactattcctcagaacctcagcctagggtgtcccctttggagaggttgaggtctggagttggatcccctagaggatccccctttggggtccaatcttagagtgtcagacatctctgactttaggtgggcaccagtgctgctttatatgttttccctccagtggcgatggtctactgtgagctttcctttggttcctgggcgtaatcccagacttttagtatcccactaatttcagtgtgatgtatcttcctgcattcctcacaggactaaggaggttctgaaacattgcagagttaatagtaccaaggttggtggggtattctctgtgaaggaaggatccagcggtatgtgaaagactgagattgagaatttctttctttcttttttttttttttttcttgagacagagtttttctttttttgagatggagtctcactctgtcgcccaggctggagtgcagtggcgcgatctcggctcactgcaagctccgcctcccgggttcacgccattctcctgcctcagcctcctgagtagctgggactacaggcgcccgccaccacgcacggctaattttttgtactttttagtagagatggggtttcaccatgttagccaggatggtctcgatctcctgacctcgtgatctacccgcctcagcctcccaaagtgctgggattacaggtgtgagccacagcgcccagccttagacggagttttggtcttgttgcccaggctggctggagtgcagtggcatgatctcgggtcactgcaacctccgcctcccgagttcaagcagttctcctgcctcagcctcctgagtagctggggattacaggcgtgtgccaccatgcccagccaatttttttgtatttttagtagagctgtggtttcaccatgttggccaggctggtctcaaactcctgacctcaggtgatccacccgccttggcctcccaaagtgcagagattacaggtgtgagccactgcacctggctggggttgagaatttctgtgagattcagggaaagcaaattgatgcagaagcaatgaccgtcaacctatgggatcccctcagtgaagtctgagatgtagaatgtctactgaagcttgtggatcccaaaggtcttcagacagtcaaatcgagtaagagaaggtaagtcaaatgcatgagatacattatcttttgcccttacaggctgactttaaggagaattttgcataagaaaagaggatttaagtcacctgaaatatgcgtgagttcgccctggatgagctgccgctgccagttgcatcacagatagggatcagggactgtaactggaaaatagagaaaagagtcttttccccttctgggcagggcagctatccccatttacgccttggccttcaggcaacaccagagggtggccctggccagctgccctcagttaccaaggaactagtaggaaacggcagctgaaagattttctgaaaaagagaaaaaggaaaaggactaaggtccttcacccgaactgggtggtagcggtcaggcacttccacacagaaatctttccgtttcaccagagagtggctccggccagaaacttacagttgcttgcatgcttatgtgctgtccaccaaggatccgtaagttggaaagggaaaaagagagagagaaaaggattcccctatatggaaaagggaaaacaaaaagagaaaagaaagaaatcccaaacctcgagcctacctcctggctggctcaccaaaatatgttaccagtggagggtgtctatgttcttggcattgtgttcttttacttttttttttttgagatggagtcttgttgtacccaagcgagttaaaaatacgccacactttgagacgaattaagagtccttaattaagccggcggccaaagagacggctaatgctcaaaattctctcggcctcgaggaaggggcttgattaacttttatacctaggtttaggaaggggagagggactcaaatgcaataagtctacagaagtaaaaacatgcaagaatcaacagaagcaaaatggttacagagagataaacaacttaaacggttacaagaagagcaacggtaccacgtgcaaggttctaaatctttcattataattagatatatagggtctatgccggacacaaactcaaggttttctgttgttatctctttgagaaaaatcctgggaacttcatacattgttggtgttagtgccttatcagttaattgggctcttttgaaatgctgaggatctgtttacccaggccaactccttaggaaagggggttgggtaaggagcccttagtgtcttgtaaattaaggggtcaattggagtttgtccggccttcccagctagagagagtcttatttacatgagaagcaaggctaggtgattaaagagacaagcaggacaaaattcaaagtaaccagttagagtaaaaacaagcttaggcatttcagtctcactctgttgcccaagctggagtgcagtggcacgatctctgctcactgcaagctccgcctcccaggttcacgccattctcctgcctgagcctcctgagtaggtgggactacaggcacccaccaccacgcccgtctaattttttgtatttttattagagacgggttttcaccatgttagccagtatggtctcgatctcctgacctcgtgatccacccgcctcggcctcccaaagtgctgggattacaggcatgagccaccacgcctggctggttcttggcatttttaacaaagaattggacgaaacacacaaagcaacaaaagaagcaacaaaagcatagctgtattgaaacaaaaatgcacttcacagagtgggagcaggcccaagcaaggctcaaaagcactggtcgcagaattttctggggtttaaataccctctagatgtttcccattggtcacttggtttacaccctatgaaatagtggcccatgaccagtctgattggttgtggaaggtgaccaagcagaggctgaagtgaagttacaaagttacgctctatgcagatgtctgactggttgcaggaggggaccaatccgaggcactttccatttttcatctgcaacacagaaagttggggggagttgcaaagggagtagcctctgatccttttgttacgtgggcatggaaatttagggttttccttttgattccgttcatgaagtcagcatgaatcagccttaggctccctgcccccagaccctattctcctgcctcactggcaaccactgatctttatcctgtctccatagttttgcctttttcagaatgtcatagttggggtcattcactacgtagccttttccgactggctgctttcactaagcaacatgcatcgtgtgtatcttcataccaccctctcacgtttcccccaggctggagatgttgagtttatctgaatttttctcgtgtcttcctgctcctccttccttgtaactctctcgcctgcagcctctgttatttcttcctctgaaggtgcacccaggcttacttatctaccctcctccctgggccatgccctgcacaccatacctcagtcatgtcatcctggattctgtttactgtcagtctttctgtttggcataggcatccctcttggctggcctgtgaggacagcccctttcctcatttcatgctcctaatggagaagccactgcaagatatttaatgtccttcacctgattttccatggccacgcaaaacctggacacaactcagccacccactgacttctttcctgcttctcatcctcaaatacccttcattgggctgttgtttcttttgaaaacatcctcccatgagggattccacagtgattccccagaggaaccacagagttgggatgaggacagtgcaagtgtgagagtgctgggtgtgagggcactgggtgtgagggcaccaggtgtgagggtgctggttgcgagggcaccaggtgtgagggtgctgggtgcgagggcaccaggtgtgagggtgctgggtgcgagggcaccaggtgtgagggtgctgggtgtgagggcaccaggtgtgagggtgctgggtgtgagggcaccaggtgtgagggtgctgggtgtgagggtgctgggtgtgagggcaccacgtgtgagagtgctgggtgtgagggcaccaggtgtgagggtgctgggtgcatgcaaggatcttgcccaggagggaagagagcttttgattgagaggagggaaacatcctctcagaagtcaagggatggccacagagtgtagttaatgtgttgccaaaggatccttgtgtcctcatgagctcagagagtgaggcatgagaacttgaggtaggccgcagtagtgttgaccgtggtggccatgcaaacataatgaacagagtgacaagcagagtggaggatctttaggacctggacaaggatcctgagctgggagcctctgccactcatttttagaggctccgtatcttcaacagagaggaatccccaccaggacaataacaaggatggcaagatcaaccatattttgtaatatcagtgccagacactgtgtgaggctcacatagtgattcattgatgcctcaaaataaatcttgtaggctaaacattcttactccgggctacagcaaggaaaatgaacctctaagaggctaaggacctgtctgaagtggcaaacggtggagcccagatgcagccagtcatgctgatcatgctgcttcagagaccatgcagtcttttctggagagtcttctattgggtcaattctggaatgcttaaataagtttttctctgtttgcagcctgaagaaatggtagaattggtgcattaagaatatgaagtcagtgttgatgtctgagatgcaattatgagatccagaagtggaacagaaactgatattctaggactaagcaccagttaggagtctgtgtttgcttcctgtggctgctgtaaaaaatttccaccaacctgttggcttaaaacaatgcaaatttattctctaaaagttctggaggccacaagtccaaaatcaatgtcactggatcaaaatcaaggtgttgatatggttgtgctccctctggatgctccaaatggaaaacacatttctgtcttttccttctcctgttggttgcagcattctttccagtcttcagatatcttctgctgtgtcttctcatcacctcctctgtgtttcaaatctccctctgcctttctcctataggaacacttgtgattacatttagagcccccctggatagtacagaaaaaaaatccccatttaaaaatttttagcagggtgtggtagcaggcacctgtaatcccagctactcaggaggctgaggcaggaggatcacttgaacctgggaggtggagttgcagttagccaagataatgccacttcacttcagcctgggcaacagagccaggctctgtctcaaaaataaacaaaacaaaataaaataaaaatactaatcacagaagggtacattggcttggctgtaatcccagcactttgggaggccagtcggggaggatcacaagagcccaggagtttgaggctgcagtgagccatgattgtgctgttatccggtctgttcaacagagcaagatcctgactgtagaaaactaagtaaataataataataaaattctaatcacatctggacagttcctttttcccaaaagttcacattcacagagtccaggggcttagaacatacatactttttgcaatggttaatggctttatatcctgcagacccagttcattctgtggatttctctttttatcttcacctccctgcttattctcttttttgagacagggtctcactctctcacccagactggaatgcagtggcccgatcttggttcactgcaacctccacctcccaggctcaagcgattctcctgcctcggcctcccgaggagcttagactacaggcgcccaccaccacacctggctaattttttttttatttttattagagatgaggttttaccatgttgaccaagctggtctctaactcctgacctcaggtgatccacctgcctcagcctcccaaagttctgggattacaggtgtgagccactgcacctggcccctccctgcttattcttattcttctgccctctatttggggactagtgttacttagtcacttctttattatgtttgcttgtattttgcactttaccactgataccatgtttgctgatccatccctccctttcacagcctgcatacggattacagtttgtagtttggaaacaaaccagagacacttccattaaacagttgtctccttcatctccccctccccctccccctctgatgcttctccagtaacttaggcattttggatttctttcagactggaaagctacccttgaggagaataggttgaattctgaaaaagatcgagctagggaagaactatcccaccacgtggaagtgtacaggagtggaccggaggagccaccctctttggtattaggaaaagtgcaagatcagagcaaccagttaagggaacaccaggagaactccttgaggttcatggtactcacctcagagagactgtttgctcaaagggaacattgtgagcttgaacttgggggaggttattctctaccttctactttaagccttctacctacaacattacctacaagtacaggtttccctaagcccaactcacaagttaaagagttgaaacaaaattcagctttcattaatcatgagaaaaatggagcagatgggaagcactgtgagagtcatcagtgtgctagagctttctgtcagagtatttacttgagtaaacttggaaacgttgaaacaggaaagaaaaacccttatgaatatattgtcagtggtgactctctcaactatggttcctccctttgttttcatggtagaactttttcagtgaagaaaagtgatgactgtaaggattatggaaacctcttcagtcacagtgtgtctctgaatgaacagaagccagtgcattttgggaaaagtcagtatgagtgtgatgagtgcagggaaacctgttctgagagtctgtgccttgtacaaacagaaagaagtggccctggagagacccccttcagatgtgaggaacgctgtgctgccttccccatggcctcatctttttctgactgtaacatcattcagactacagagaagccatctgtgtgtaatcagtgtggaaaatctttcagctgttgtaagctcatacaccagagaacacacactggagaaaagcccttcgaatgtactcagtgtgggaaatcttttagccagagctatgaccttgtcatacatcagaggacacacactggagagaagccctatgagtgtgacctgtgtgggaaatccttcacccagagatccaaacttattacacatcagcgaattcacactggagaaaaaccgtatcagtgtattgaatgcagaaaatccttcaggtggaactctaacctcattgtacatcagagaattcatactggagagaaaccgtatgagtgcactcactgtggaaagtccttcagccaaagctatgagttagttacacataaaagaacgcacactggagaaaaacccttcaaatgtactcagtgtgggaaatctttcagccagaagtatgaccttgttgtacatcagaggacacacactggagagaagccctatgagtgcaacctgtgtgggaaatccttctcccagagttccaaacttattacgcatcagcgaattcacactggagaaaaaccgtatcagtgtattgaatgtgggaaatccttcagatggaactctaacctcgtcatacatcagagaattcatactggagagaaaccgtacgattgcactcactgtggaaagtccttcagccaaagctatcagttagttgcacataaaagaactcacactggagaaaagccctatgaatgtaacgagtgtggaaaagccttcaatcgaagcactcagctcatcaggcatctgcaaattcacactggggagaagccgtacaaatgcaatcagtgcaataaagcctttgcaaggagctcctaccttgtgatgcatcagagaactcacactggtgagaaaccttttgagtgtagtcagtgtgggaaagccttttcagggagctctaaccttctttcccatcacagaattcattctggagagaaaccctatgaatgtagtgactgtgggaaatccttccggcagcaatctcaacttgtagtgcatcggcggacacatactggagagaaaccttaggagtgcagtcattgtgggaaagctttcatccagaggtctcccctcatcatgcaccagaggacgcatgtcggtgggaagagctatcagtgtgacgtgtattaagccagcggttgtgactcattgaacatcagaggacatatcctggagaaaagccctacgaatgcattgattgtgggaaagccttcaatgatcgctcaacccttagtaaacacgagaggacacacactggaggcaaaccctatgaatgtgaccattgcgagaaagcctttagccaacggtgtcaacttactaggcagcagagaattcatactggagagaagccctgtgaatgttaacaaatgtggaaaagcttccagttatgatactttccttattcaacatgagaaagctcatgggcaagaaactctatgaataaccaagatggagccgggtgcagttgccaacacttgtaatcccagcagtttgcgaggccgaggcaggtggatcacttgagcccaggagtttgaaaccagcctgggtaacatggcaaaatcctgtctttacaaaaaatacaaaaattagcctagcatggtggcgcatacctgtagtcctagctactcaggaggctgaggtgggaggatcacttgagcttgggaggcggtggttgcagtgagctgtgatcatgccatcacaccgctgccttgtgagagattgagacactctaaataaataataaccaagatgggaaatttccctgccagaccttgtttactagaaatcaggtggccaaaacatgactctcagagtggggcttcatgaccatgtgcatcagaattgcctggagtgtgcactgaaactgtgtattaccaagctcactctagccaactaaataaaaatctctggcagtaaaatccaggagtctgcagtttctaaaatcacacaggtgagtgggcatggtggctcatgcctgtaatcccagcactttggaaggctgaggtgggtggatcacctgaagtcagaagtttgagaccagcctggcaaacatggcaaaactgtctctattaaaaatacaggccaggggccgggcacggtgcctcacacctgtaatcccagcacttaggtaggccaaggtgggtggatcacgaggtcaggagattgagaccatcctggctaatatggtgaaaccctgtctctactaaaaatacaaaaaaattagctaggcatggtggcgggctcctgtagtcccagctactcaggaggctgaggcaggagaatggcgcgaacatgggaggcgtagcttgcagtgagctgagatcacactactgcactccagcctgggcaacagagcaagactgtctcaaaaaaaaaaaaaaatacaggccaggcacaatggctcatgcctgtaatcccagcatttcgggaggcaaaggcaggcggatcacctgatgtcaggagttcgagacccacctcaccaacatggagaaaccccgtctcgacgaaatatacgaaaattagccaggtgtggtggtggtaatcccagctactcgggaggctgaggcaggagaatcttgacctgggaggcagaggttgcagtgaaccaagatcaagccattgtgctccagcctgggcaacaagagggaaacttcatctcaaaaaaaaaaaaaaaaaaggactctggtgaggcttggtggctcatgcctgtaatcccagcactttgggaggctgaggtgggtggatcacttgaggacaggcattcaagaccagcctggccaacatggcaaaaccccatttctactaaaaatacaaaaattagccgggtgtggtggcacacatgtgtaatccagctacttgggaggctgaggcatgagaattgcttgaacctgggaggcagaggttgcagttagctgagatcatgccactgcactctagcttgggcaacagggcaagactgtgtctcaaaaaaacaaacaaacaaacaaaaaaccctgagctggctgtaatggctcatgcctgtaatcccagcactttgggagaccgagcggccaggcagatcacttgagcccagtagattgagaccagtctgggcaacatgttgagaccccatctctacaaaaaatagaattagctgggcatggagctgcacacctgtagtcccagctactcaggaggctgaggcaggagtattacttgagcctgggggtgggggggatggtctcacctgcagtgagctgagatcacaccactgcactccagcctaggcaccagagcaacactgtgtctccaaaaacaacaaaatattggactctgaatatttcagggattcggttgtgctttaactttgttgctcagttggtttgattgtaatcagaactggcagcatgttaatatggaaaatacttatcaggggatgtgaaaacaggagcccaagtagtatgttcacagaaggttacaagcacataatttaaattggtccactcagcaacatgtttcctaaaagaaaaaaatgtaaattgacagtagtggggagactagaagaggccatgtctgcatatttatttatttatttatttatttatttatttaagacagtctcactctgttgcccaggctggagtgcagtggtatgatctctgctcactgcaagctccacctcctgggttcacgccactctcctgcctcaacctgctgagtagctgggactacaggcacccgtcaccacgtctgtctaattttttgtacttttagtagagacaaggtttcaccatgttagccaggatggtcttgatctcctgacctcatgatccgcccacctcggcctcccaaagtgctgggattacaggcatgagccgccacacccggccgcatttatttttattttttgacacaggctgttgctctgtcacccaggctggagtgcagtggcgcagtcatggctcactgcagcctcagcctggatcaactgatcctcctgtccttgcctcctaagtagctgggaccataggcatgtgacatgaagcctggctaaatttatttttttagagacgaggtctcaccatgttgcccaggctggtcttgaactcctgggcccaagtgatctccagccttggcctcccaaagtcctgggattacaggcatgagccatagtgcatactattactgcacatttaagcaggataagagccaatgggagggtgagcatggtggcttatgcctgtaatcccagcactttggaaggccgaggcaggcagatcccttgaggttaggagttcgagaccagcctggccaacatggtgaaatcccatctctactaaaagtacaaaaaattagccaggtgtcatggcatgtgcctgtaatcccagctactcgggaggctgaggcaggaaaatcacttgaacccagaaggtggaggttgcagtgagccgagactgcgccgttgaactccagcctgggcaaaaaagcgaaaagcgagactctgtctcaaaaaaaaaaaaaaaaaaaaaaagggctgtgtgcggtggctcacgcctgtgatcccgacactttgggaggccaaggagggtggatcacgaggtcagatcaagaccatcctggctaacacagtgaaaccccgtctctactgaaaatacaaaaaatcagccaggtgtggtggcaggtgcctgtagtcccagctacgagggaggctgaggcaggagaatggcatgaacccaggaggcagagcttgcagtgagccaaaatcatgccactgcactccagcctgggcgacagagtgagactcggtctcaaaaaaaaaaaaaaaaaaaaaaaaagatggaagtatagccaatagcgaaacatacagaatgaggaaggctggagagggtcaggcgaggagaggctgtggcagcagatgtggcagccccagcagagccatagactgatagaccagaaagtgggttaatcgaaggtctgtccatgaaactcagactcttccccatttttttttcttgcctggcattacctatctggctgtgggtagcaaaaattaaagtagggaaggagtcatgtgctaaaagattagttcaggggacaagggaatctgatgtattttgctctgcagcaagggctgctttattctggcatttcagaactttttacctgatagctggttctcgccctcttcaccctcgagcaaagcgtactgttaaagcagccccgcctgtctgtggagcttcctgtctgctttctgatagtctcttcaatatgggtgggaggcaaggagcaaaagataaagtctccatcatgagagaaggtatctaagacagcagaaaagacagatattcagaggaaccaaatattctttgttttttgagacggagtctcattctgttgctcaggctgtagtgcagtggcacgatctcggctcactgcaacctttgcctcccaggttcaagcaattctcctgccgcaatgtcccaagtagctgggattacaggcacgtgccaccatgccaagctattttttgtattttcagtagacacggggtttcaccatgttgaccaggctggtctcaaactcctgacctcaagtaatccacccaccttggcctcccaaagtgctgggattacaggtgtgagccaccgcacccagcagaatcaaatatttaaagcattttgttaacgtaaaagtgagtcaagaaagggttacaaggccgggtgtggtggctcatgcctgtaatcccagtactttgggaggccgaggcggtcggatcgtggggtcaggaggtcgagaccagcctgatcaacatggtgaaaccccatatctactaaaaatacaatacaaacattagctgagtgtggtggtgggcgcctgtaatcccagctacttgggaggctgaggcagaggttgcagtgagccgagatcatgccattgcactccagcctgggtgacagagcgagactccatctaaaaaaaaaaaaaaaaaaaaaaaaggtctggtgcggtggctcacgcctgtaatcccagcacttcgggaggccgaggcaagcgtatcacgaggtcaggagatcgagatcatcctggctaacaggtgaaaccccgtccctactaaaaatacaaaaaattagctgggcatggtggcgggcacctgtagtcccagctactcgggaggctgaggcaggagaatggcgtgaactcaggagaaggagcttgcagtgagccgagatcacgccactgcactccatcctgagcaacagagcgagactgcgtttcaaaaaaaaaaagagggttaccagtaaaaaataagacagactgggcgtagtggctcacgcctataatcccaacactttgggaggccgaggcgggcggatcacctgaggttgggagtttgagatcagcctgaccaacatggagaaaccctgtttctactaaaaatacaaaattagccgggcatggtggtgcatgcctgtaatcccagctactcaggagtctgaggcaggagaatcgcttgaacctgggaggtggagattgcagtgagccgaggtctagtgccattacactccagcctgggcaacaagagtgaaactccgtctcagaaaaaataaataaaaataaaaaataagatactttgataaaatagaacaatgagaaccagaacaggctctttgaaattacaagtaagattgttcaatgttatagatacaatgtttagtgagaaacagaatgcttgttgcctggtgctgcaaagaaatagcactcaaaacataaatttaattctctcagcaaggccgtttttactttctgcagaaagggtgctcatcacagatggaacaatggcaagagcacacctgaacaaaggagggaagcaatttttattccttaggcagtttgtccctgctactgtgtcctgtctccgttggctggagccagcctgcacaatctaaactaaaactagattagctaacagtttaaaacttttctaaataggtaaaagtagtggaaagacgaaggaaaagaggaagttgcttatgccagatatggaaggagcataggctgtaagctggaacgtgaccatgagcatgtccagcacaaataacttggttaaggtacagggacatagaacgtactacgtgcctgtgagcatgtttaccagctacataggatagggcctaacaaagacttactagcacaaagcaaggaggtttcaaggaagttagtttataaaagaaactattattttttaacacttatgatttattctttaacaagaagggaaactttgaagaggaacttttactttccacattgaacaaataagtaagaaaaagaaagggaaacttccccagggctgaaaggaaattttcaggtcatgccattattatcagaattaataagacccatgcatcgtggaaaactgagaacaccacgactaaaaacagatggcaggctgggcgtggtggctcacgcctgtaatcccagctctttgggaggctgaggcaggcagatcacctgaagtcaagagtttgagaccagcctggccgacattgtgaaacctcatctctaataaaaattcaaaaattagccaggcatggtggcagccgcctataatcccagctattcaggaggctgaggcaggagaatcgcttgaactcgagaggtagaggttgcagtgagctaagattgtgccactgcactccagccttgggcgacaaagcgagactctgtctcaaaaaaaaacaaacaaaaaaaatgtcagggtcgggcatggtggctcacacctgtaatcccagctacttgggaggctgaggtaggagaattgcttgaacccaggaggtggaggttgcagtgagctaagattgtgccactgcactccagcgtgggcgacaaagcgagactctgtctcaaaaaaaaaaaaaaaaaaaaagatggcagggctggcatggtggctcacgcctgtaatcccagcactttgggagaccgaggcaggtggatcactctaggttaggagtttgagaccagcctggccaagatggtgaaaccctgtctctactaaagatacaaaaattagccaagtgtggtgataaatgcctgcaatcccagctactcaggaggctgacgcaggagtatcacttgaacctgggaggcagaggttgcaatgagtctagatcatgccactggactccagcctgggcgacagaatgagactctgtctcaaaacagagcaaatggcatggcagaaccttctctagagaaaatagttttgaatctaagaaaggaatagctttaatctagaaaaggaatagggcaagaaaaggaatgtttattcacccataacttaaaaaaaaaggtaattttaattgaaggcttcaaggtaaattgtgctcaaactatacaaattctgctagatggttatagttcctatgtgaaggtaactttagaaagtagtgttcacttgacactgatgtgagtaattcttgctggagggggcaaaaagctcatgaaatttgaataaaggaggaggagatgcagtcagattgttgattgacccttcagggaatggcatttgcatagctgtgacgtgaaccctaggtattggctttttttttctttttttttgagaaggagtctctgttgcccagtctggagtgcagtggcgcgatcttggctcactgtaacctccgcctcccgggttcaagcaattctcctgcctcagcctcctgagtagctgggattacaggcacgtgccaccacgcccagctaatttttgtatttttagtagacacagggtttcaccatgttggtcaggatggtctccaactcctcaccttgtgatccgcccaccttggcatcccaaagtgctgggattacagggatgagccattgcacccggcctgtattggcttttaatttttaggaagtaacacatggctgtgacctgacaacttcatagtggccgtagggtagggcactgttgtcattattcctgtcactgacaatgtcagccccacctgcagatgtgggagagtagatggggaaagtagtagtggagagtagaggtttcccttaccatccttttaggaagtaggcttttaaacatgatatgtaagtttatttagaagatgaaaattaaagcttgaaatgtaatatgagaggaattggcagcggatgtgagtcagatcctcacctgtcagagcaggaagttagtgaaaactaaagatgattggctggatgcggtggcttatgcctgtaatcccagcactttgggaggctgaggtgggtggatcacctgaggtcaggagtttgagaccagcctggccaacatggtgaaactctgtctctactaaaaatacaaagattagcccagcgtggtggtgggcacctgtaatcccagctactcaggaggctgaggcaggagaatcgtttgaacccaggaagtggaggttgcagtgagctgagattgcatcactgtgctccagcctgggcaacagagtcagactccgtctccaggaaaaaaaaaaaaaaaaagactaaagatgatcaaagattagaattacggaggtgtcctcaagaagaattggaacagatatggttaaaagtggctggaggtgggtgcagtggatatggtggtgcacacctgtaatcccagtgctttgggaggctgaggcaggtggatcacttgagcctaagagttggagaccagcctgggcaacatggcgagacctggtctctacaaaaaatacaaaaattagccgggcatagtagcacatacctgaagtcccagctactcaggaagctgagttgggaggattctttgaccccaggaggttgaggctgcagttagctgttattatatcactgcactccagcctatgtgacagtgtgagaccctatctcaaaaaaaaagtgatgtcgggaggctgagaggatgagtgactggggcaggagatgagtactttcccttttaagcccatagcatttaattccctggtggttcacttcttatttggataactaacaaattatttcaaatgtgtgcctataggtgagagaagcaatggtacatgaggaggtaagcatttgatttgtgggattatgaacaactgtcctactctccttttgattcggtgtctctgtattagtgatctgacaatttaaaaaatcaagcaagagcaggctgggcgcagtggctcatgcctgtaatcccagcactttgggaggccgaggcgggcggatcacttgaggtcaggagttgaagaccagcctggccgacatggtgaaaccctgtccccactaaaaatgcaaaaattatctgggcgtggtggtgggtgcctgtaatgccagctacttgggaggctgagcaggagaatcgctggaacccgggagttggagattgcaatgagccgagattgccccactacactctagcctgggcaacagagtgagactccttgacaggaaaaaaaaaaaaaaaaagcataaagaaaagatgtcagacttgtctgtttggccagtttgagtttatttcagcaggcagggcaggaaggttccttggcttcctagaatcccctggagttggatgggtgtggtggcttacacctgtaatcctaacagaccaaggcccaggtggaaggatcaactgaggccgtgagtttgagattagactgggcaacatggcaggactctgtctctgcaagaaataaaaaaccaggtgtggtggcacgcgcctgttgttccagctactcaggaggctgaggtgtgagatcacttgagcctgagaagttgaggctgcagtgagctgagattgcaccactgcattccagcctgggcaacagagtgagaccctgtttctttaaaaataaaaataaaaataatcccttggatttaaagggagtgggttagtccttgaagatttgattttccagaattcttatcaagaagaagttgaggcgggagaatcatgaggtcaggagttcaagaccagcctggccaacatggtgaaaccccgtctctactaaaagacgtggtggtgcgtgcctgtaaatccagctactcaggaggctgaggcaggagaattgcttgaaccgggacctgggaggcggaggttgcagtgagctgagatcgtgccactgcactccagcctgggctacagagcgagtctccttctcaaaaaaaaaaagaaaagaaaagaaaaaaaggccgggcgcggtggctcatgcctgtaatcccagcactttgggaggccgagttgggcagattgcaagttcaggaaatcgagaccatcctggctaacatggtgaaacccatctctactaaaattacaaaaattagccgggtgtggtggcgcatgcctgtaatcccagctacttgggaggctgaggcaggagaatcgcttgaacccaggaggcggaggttgcagtaagccaagatcgcaccattgtactccagcctgggcaacaagagcgaaactctgtctcaaaaaaaaaaagaagaaagaaaccaaaaaagtagaaaatcatattatcatatactttaatagcacaacaaaattacaaattaataattgtgggtattttagaatatatatgaaacagctatttggtcaaagaggaaataaaaatactacatctgtttaagtaaaaataagtactctgtatcaaatgatcaacatgaatacaaaataccaaagcttgcctaaagcctaggccgggaacgatggctcacgcctgtaatcccagcactttgggaggccaaggtgggcggatcaccaggtcaggagatagagacccgcctggccaacaggccgaaaccctgtctctactaaaaatacaaaaaattagccgggcgtggtggcgggtgtctgtaatcccagctatttgggaggatgaggcaggagaatcgcttgaacccgggaggtggagattgcagtgggccgagatcgtgtcactgcactccagcctgggcgacagagtgagactctgtctcaaaaaaaaaaaaaaaagcctattctgtagacaagtgtgtctcacgttttttgtctcaagaccccttcacactcttaaaagtcactgaagaccctaaacagtttttgttttgttttgttttcccccaagacagagtcttgctctgccgccaggctggagtgcagtggcgtggcctcagctcactgcaacctctgcctcccgggttcaagtgattctcctgcctcagcctcccgagtagctgggattacaggcgcatgccaccacacccggctaatttttgtatttttagtagagacggggtttccccatgttggccaggatggtctcgaactcttgatctcatggtctgcccacctccgcctcccaaagtgctgggattacaagtgtgagccaccgtgcccggctcctaaacagtttttgtttatgtaggtcctatcaatatttggtgtattaggaattaaaacggaaaaaaattaatatattttattaatataatttttcaaaatctattctatgttaatatataggttgagctgtgtctcttcccaaaattgatatgttgaagttctaacccatagtacctcagaccttatttggagacagtgtctttaaagagctgaaatgaggtcattagagtgagccctggtccattatgactgttgtccttataaaaacagaaatttggagacagacaacttgtcacgcatacagggaaaatgacatttgaagacaaagtcagacatctacaagccaaggaatgccagagattgccagcaaaccaccaaaaactaaggaaagggatggaacatatactttcttgtagccctcagaaggaaccaactatgccaacactttgatctcagacttctggcttccacaactgtaacaataaatttatgtcgtttaagccaccccatttgtggtatgttgttaccagagccctcatgactaatacaacatattttttaaaaagcacctactttacgaaaaacagcattttccaaaacagaaatagggagaagagtggcattgtattatattttttcaaatctccttaatgtctggcttcacttaaggcagttgagttcccatagctccatgttcccattgcatctgttacaatatgactcatccagcagcctctggaaaactctattgtatattcctatgaaaatgagagaggaatagcactgggtagtccaggagaatggaaaaacccaaacgacaactaaaacaagcagtaggcaaagaaaccacagaataacaaaacccaaaataagggagagaagacagccaaaaccctggtcagggtgacaggtccatgactcttccaggcaaacccaaataagggagaaagggggtggtaactggggtggggcagggggagggtggtgcctgaaatcccctccttttccagataccgaatgactattccacccataattaaacacccataaaatgagaaatgcaaacaatgttgggtgtgactcaggagccaggagcccccccacacttgtctcccgtgtttcctttcactttgcaatgaaagcttcttgcctttctgcttactctgacttatccctgaattctttcctgtgatggcttcaagaacctggacaccaactggcactggcatccggtgaccttcctgagccctctggcaacaaaagaaaaagccaacatctcattattattatgaatttagttttgaacccaccgatcccttgaaaggatctcaggaacgcccagggctccctgacccacactttaagaactactgcaatagacaaactcctaccttataatcaaggagataaacaagaactagaaaagaaaaaaaaaataggctgggcaccgtttttgtaattccagcactttgggaggccaaggcggatggactgcttgaaatcaggagctcaagaccatcctaggcaacatcacaaaaccctgtctctacaaaaaatacaaaaattagccaggcatggtagcatgaggctgaggtgggagaatcccttgagcccaagaggttgaagctgcagtgagctgtgatcacaccactgctctccagagtgggcaacaggtgagaccctgtctcaaaaaaaaaaaaaaaaaaaggaaagaggaaataataggacatcaaaatcacagattccacaccattagaactaggaggaaagctgagcccagtgactggctccaaaatgaatacacagggccgggtgcagtggcgcattcctgtaatcccagcactttcagaggctgaggcagataagattgctttgagctctggagttcaagaccagcctgggcaacatggcaaaatccagtctctacaaaaattggcccagtgtggtggctctcacctgtgctcccagctactcaggaggctaaggatgcaggatcacttgagcctgggaagtggaggttacaatgagccaagattgcagcactgcattccagcttggacaacagagtgagaccctgtctcaaaaaacaaataaacaacaaaaaaagaacacacaggtttcccctaaagagaatagatctttgcacacctgcccctacctctccaacactggtggccactgtgcaggggaaggcaatagatcctcctagtaccttctctgcctacagagaaggggatgctgcctgggagctttttgggactcccaatagaagacagatttagtctcctggaaggctgcctgatccagttcccacagcagctgccacttgctcaggtgagtgaagacatctgtcaaaagtcagaattttatttttattttattttatttttgagatggagtctcactctgtcgcccaggctggagtgcagtggcgcaatctcagctaatcgcaacctccgcctcccagtttcaagcgattctcctgcctcagcctcctgagtatctgggattacaggtgcccgccaccacacctggctaatttttgtatttgtattagagacaaggtttcaccatgttggccagggtggtctcaaactcctgacctcaggtgatccacccacctcagcctcccaaagtgctgggattcactcacaggcgtgagccaccacacccagccaaaagacagaattttaacaaatttggttaaagatcgaattggcttttatttgtgattcatgaatctgggcagcctccactctgcaaaacggaatgagagctcccacggggcaaatggtagaatagtggtttttgtaagatagagaaaaggctaattagttaacactaggttacttttcttgtaaggattaaagcagaggggacttccttattatgctgctcaggtagactggaaatctggtttgtttagggatctacctgcttaaagtatcagtctgattatgtggcatttagcctaagtgactctgtcttggtttggtctggtctcatgaggcctagagcaggagctcagtccaaaaccatgtcctctcataattttgtgtaacttgcctaacacctgctccttctcaggaacgaggcccagcaaaaagcagagacggtacagggccagaaggatctgagagagtgtggccagcttgagccctcaggagtcggccagaaggatctgagagagtgtggccagcttgagcccctcgggagtcagctcctccgtccccactggtaacgtcttcaccccttcaacacggtgtgaagggccatgtcatggttgatcttcagtccctcagactacaccatcagccccatgggggtgagcaaataacaagtaactatactgttccctgctatgtgtctggctcttggtaaaatttaaaaaagttaaaaattgttgtggtttgaatgcaacatttttgaatggaaatctgcttccccatttttcttttttaataactttttattttttttttgagacggagtcttgctctgtcacccaggctggagtgcagtggcctgacctcggctcacggcaacctccgcctcccaggttcaagcgattctcctgcctcagcctcccgagaagctgggactacaggtgcccgccaccacgccgggctaatttttgtatttttagtagagacggggtttcaccatattggccaggttggtctcgagctcctgacatcgtgatccacccgcctcgacttcccaaagtgctgggattataggcgttagccaccgcgcccgacctttaataaacattttaatggactacaacagacccacagaaaaagacacatcacaaagtgaacacccacagggagaagcaatagggctgtcagaggcattcgacccagagcgactccattttgagtgagggctaggaaaatgaggctgggctgcattcccagaaaagtaggtattcctaacctctagatgtttacggttaagggaacaaattaataatgggtactaaaacagacccagacttgggagtgtccagatatcccggtatctagagaacaaaggcattcctaattttgctttaaaaataatatcgattcttgaaaaatacagtaagaaaattaatcctttttcacaaacccttgtagcagagcacatctccccaaaatctatttttagcccaaatatacacaagcattgtacctagggtgcatacgttcctcttactttcaggaacgtcctactgtctatggggtagctgtttcacaactttactttctcaacaaacttgcttttactttgcactgcggactcgccctgaattttttcttgcgcgagatccaagaaccctcccttggggtctgaatcggacccctttcctgtaacacaaccaccgctcccagcctccccgcttccagccgctaagcccaaagtcttttatatgaacaaacctctaactcgtcctgtgactttgatgcgtgtgcgttttaggcaccggggagcagagggtaaagcggcgcagctccgggcctcctcccgcgcaagttcccgagaagagcaggtccggcccgcgcagacgtgcacggtccccagccattaggaggagcagacggtccccacccccacaatcagtcatctctcggggtccgcccttgcttcctgcccacgagtgaggcctctggttgcccgcaacctaaggggcatcgcagccccgagcaacaccgcccccaccagccttagctgagtgctcccattggccagaggccagcgggtgggggctcccattggccatcggccataatgcttccattggtcgaaggccagaccagcggagactcccattggccgagggctgtggttcgccgcacggcctactgggagttgtagtcgccgcgtcgccggtgcggccgccattgtccggcgttcggcgagtcgggtggtccctttggctggagtgcctctctggtctggggatcacctcaggcgctgtccttcactgggcgatccagcatggaccccgaggacgaaggggtagcgggagtgatgtctgtggggccgccggcggcccggcttcaggtaacaataacaacaataacgacggcggcgggctccgggcaagcgtctcccgcgcagactgaccctttcacctcgcggcgcgatgagagcggcaccgctgttaatgcccttgacacgtggggaaactcagacgcgggtcggggcgtggtgaccgtcctggctggtcagagagggggccgggattccaaccaggcgcctggcccccgaatgcgcatgctccacgcggctctgtcctccccagggctggggtcggtcattcccgagagaatcgagcaggcccatctcctgcgttctgctccgccccgccgacacccttgcccattccaggaaggtctgtcctcgtgttgactgataacagtaattgtagcgttggccgggtgcccagatggcaagaatcatcgaatagagatgctttaacgcgtggagtcagcggacacccaccgggaccccagcaccgcggagcccctgccctggggcttgggcacaacctcttgggggcaatgatgggtcaccacgcactgagtgtgatgagagtgaccaccagggtcgtcccctgcgagactgtgggagaactgcagtgcagggcggtcagtgtttgcagggccatctggccatcagagctccactttctagacaaagtggttgcggcctgtgttctccataaagctgcctcgcgtggcaggaaacaacaataattatccttcctcaagctctgcaactttgaaattatacttttttttattttttgtcgttggtttgttcatggggatttgcattatttcagatttggtacacaaagtgagacttgataatcttaggttgcaggttttcagatgtgtgttgctccaaatttgcatgaaatgctaccacgttttattttgttcttgctgtggatgggggacaaggaatgagtcgtaagaaaggcttgagagaaagtgtattagttacctgttgctgtgtaactcaaaacttcgtgacctggaacaacaataaatatctcacgagttctgacaggagtaatggaatgtcctagctggtggttctggttcaggcccatgaagttacagtgaagatgtcagcatagctgttgtcacctgagacctgagtctggaggatccacctccaggatggctcactcacatgtctgttgataggagacctcagttgttctccatgtaggcctctctttggaactgctagggatccttgcaacatggcatctggcttcccacagaacaagtgatccaggagagggcaaggtagaaactgtaacaccttccatgacctggattcagaattcacactcttgtcacttccacggtgtcttactggttacaaagtcaaccttgttgagtgttggaggggaccacaccagggctggaggtcattggcagaggtggtgggggagcatcttggagactgtccatcacaggagacaaggaccagaatggagagcttcaaggtccagtgttttatctggttatctgtgtctgctgtaacaattcactacaaattttgtggcttaaaacatttgttcttaggttctggaggtcagaagtctgaaatcggttttctggtctggaatcaaggtatgagcagagctaccctccctaccaaggttctagggtagaatgtttcctcgtcttttccagctgtgagaggtacagaccttctattccttgcctcatggccctttgcctgtcttcaaagcctgcattgtagcatgttgcttcagtgatcatattgccttatgtcttctatagtcatagctccctttgtctacctcttataaagacacttgtgattgcatttagggcccacctggataatccaggataatttttctgtttgaaaatcctaatcacatctgcacagttccttttaccatatatagtaatattcacaggttctaggaactaggacctggatatccttggaggccattatatatctcagtctaccatagccaggctgagaggagccatccagtattcagtgatgagaaggagccattcacgtgttttaagcaggactggcatagggttgaaaaaatccacttatgcattaggggctggtgggaagggagatactggcagctcaactaaggcagtgggaaaaagagaggagtggttaggcccagtgaccaggtgttggctgatgctggggtgaaaagaatatgtaaaggagaaacatcagagcacagccccaccccttcaggctccagaagtgcaagacaagagggaaggctgcagggatctgatgtagggcagaaagaacatcatgagacaacaaggagtgggcttctgctagaattccaagaaggaagccaagaggaggcatgaaggacttgtatgatgccactgagaattctcatggcttggacagaccagtactcagtggacgtggtgtctaggctgtcaccagtgactcttgcagaatgggtgatgatgggaggtgggggcaggaggcacgggaagcacaaatcaaaattggtgggcattctgagtggaggaaagcgaagacacagagacaggagcagagacctcagttcccaaccaaaggcatctttctgtatgtttcctattagagccacctgctacctgtactaaaatttctttcttattttttaatctactcatgtttttcttaaaaggaaatgtccttttaaaattgaagtatttggggcctggtgcagtggctcatgcctgtaatcccagcactttgagaggccacagcagatggatcacttcaggttaggagttcaagaccagcctggccaacgtggtgcaaccccatctctactaaaagtacaaaaattagctgggtttggtggcacatgcctgtaatcccagttatttgggaagctgaggtgggagaatcacatgaaccagggagatggaggtcgcagtgaaccgagattgcaccactgcactgcagcctggtcaacagagtgaggccctgtctcaaaataaaaaataaaaaaattgaagtatttagtatatgtggttttgttttgttttttaacctagcagcaacactggtggtgtatagttttgatttttcatttccctgatgactaatgatgttgaacatcttttcatgtacttatttgccatttgtgtatcttcttttatatattcttcaaagaaataactatacagattctttgcctattttaactgggttgtctttttattactgagttgtatgtgttcattacatattctagatacaagtctcttatcagatatgtgattcccaattattatctcccattctgtgagttgtcttttcactttcttgctaatgtcctttgaactacaaaagtttttgttttgatgaagtccaattgattacatttagttgcttatccttttggtttcatatctaagaatcccttgccaaatccaaggttacaaagatttatctctctgttttcctctaagagttttatagttttagctcttacttttaatttaatttaatttttttttttttgagatggagtctcactgtgtcgcccaggctggagtgcaatggcatgatctcggctcactgcaacctctgcctcctgggttcaagcaattctcctgcctcagcctcccaagtagctgggactacaggagcacgctgccacgcccggctaatttttgatattttagtagagatggtgtttcaccatgttgcccaggctagtcacgaactcctgagctcaggcaatccactcgtctcagcctcccaaagtgctgggattacaggcgtgagccactgcgcccagcctcttacatttatggctttgtttctattttattttatttcttttttttctcttcttttttttttctttgagacaggatgtcactctggttgcttaggctggagtgcggtggcatgatcttggcttgctgcaacctccactttccagactcaagcactcctcctacatcagcctcccaagtagctgggactacaggcagcctggctaatttttttcaaattttttttgtagaggcagggttttaccatgttgcccaggccagtcttgatctcctggactcgagtgatctgcctgcctcagcctcacaaagtgctgggattacaagcatgagccactctgcccagccagcctaatttgttttgagttaatttttatatatgatataagatagaagtctgtgttagtttgaatgtgtctcccaaatttcatgtgttgatagtatttgaaggtggcgacttttgggagaaatttaggattagataaggttatcaggattggactcccttgatgggactagtggctttagaaggagagagagacctgagctggcacactcttgccctctcgccatgtgatgccctccaccatcttatgtcataacaagaaggccctcaccagatgccagtaccatgatattagacttcccagccttcagaactgtaagaaataaactcttttttttttttttttttgagtcggagtctcactctgttgcccaggctggagtgcagtggcgcaatcttgactcactgcaagctctgcctcccgggttcacaccattctcctgcctcagcctcccatgtagctggaactacagacgcccaccaccacgctcggctaattttttgtatttttagtagagacagggtttcatcgtgttagccaggatggtctcgatctcctgacctcgtgatctgcccgcctcggcctcccaaagtgctgggattacaggcatgagccaccgctcccagcccacaaataaactgtcttcatcaaagttattgaaagagagagagagaaaaaaagcaactttctttataaattacttcgtccttaggaggacaaggcgagaggatcacttgaggtcaggagttcgacaccagcctggccaacatggagaaaccctgtctctactaaaaaatacaaaaattagctgggtgtggtggcgtgcacctgtagtcctagctactcaggaggctgagccaggagaatcaactgaatccgggaggcagaggttgcagtgagccaagattgtgccactgcactccagcctgattgacagagtgagactcccatctcgagaaaaaaaaaataataaattattcagtctgtgatattctgttacagcaacagaaaatatgctgggacagggactatctttactcttttccatgtggctatccagatgtcctgtaggaagtgtttgtaaaccacttaatcattatacagcccccaaggggtgatgctttgttgacatggaaactgggaagcaaagatgcttcttggggacgaagtgactgagccaagactctgatccagaaatatctggctttcaagcatggctgcagaagggctttgtttatgggacacattttaggtaatgttgcatcaacttataaaaatcagaatttttcacgtaaaggccaggcgcggcggctcccgcctgtaatcccagcactttgggaggccgaggcgggtggatcacttgaggctaggggttcgagaccaacctggccaacatggtaaaaccccatctctactaaaaatacaaaaattagccgggcgtggtggtgcgctcctgtagtcccagctactacggaggctggggcaggagaatcacttgaacctgggaggcagaggttgcagtaagtggaggtggcaccactgcactccagcctgggtgacagagcaagactctacctcaaaaagaaaaataatttttcacataaaaatctgacctaattttcagcttctcttcagagatgagcagttctgacaaagggacctgtattttcccgtaatcagtgagttctgagtccctgctgctccttcagacagggtccatgctccccatcacctccagtcccaccactcataggtaagtgtccttgtgggctcttaaactggcccacttctgtcatgtgagcctgccttgccctgaaagcaggcgaatttctgaccccagccctgtgtgcttctcttttcaggaaggatggtgaacctgtttttttgttttttttttttgagatggagtctcactctgtcgcctcagctggagtgcagtggtgtcttggctcactgcaacctccacctcctgggctcaagcgattctgctgcctcagcttcccaagtagctgggattacaggcatgtggcccagccaatttcactttgtatctaagtattagtgagtgtattagttagctgctgtgtaacactgtcctaaaacagtatctgttttacttaaaacagtaactgtttctttagctcacaaacctgcaaataagtggtttaggccagtctctgctggtaccctcgtctgtcttgttagatgtaggtcagctctgcctggcgttgttgatcttggtgagtcctctcacatgtcctcactgtacaacccacacctatgtgtagtggcctaataggtgcccagtgagacctgactcccatcattcataacgtgcagtctctcgtgacacaggcctgcctgttttctccttttccattcttcctctgccagaaagcactgatggagatagtccagctgattgagaatgtgtgtgatgtttcaggaaccagtgaccttccgggatgtggctgtggactttacccaggaggaatgggggcagctggaccctacccagaggatcctctaccgtgacgtgatgctggagacctttggtcacctgctctccataggtaagccctgcttcgcaaggtgtgatagctgattctctctgggttataagtcatggggcctctggtgtgaggacctgaccttgggtcctcactccctatggggagtgcatgaagagggaggtctgcccttttccatcaccatgcagagcttcaccatgttgtgaggtgcccacgtgtcctcacagtcgggagtctggtctggagcctgggcttgttgtttctctcctgagcagcccctcacctcctgtgtttttccccatttccaggtcctgagcttccgaagcctgaagtcatctcccagctggagcaagggaccgagctatgggtggctgagagaggaaccacccagggctgccatccaggtgagaacccactatgtgggagcagctaatgggagcagcctagcaggtcactggagatgcacttcatggaaagggtggtggttggtggtcctgaagaccaccccattcactaggagtatacaggactcagcatagagtcatgctgacagctctcagtataatgagaccaacaaaggggaaaggcgcgtggggataagttcagaggaagccaggcatgagcctccagagtcccctcactgtggagtcattcaggatgtgccaggctcccccagcactcaggtgtgacacctcatgagacatgagctctaccagggaatcttgttaagagactcagtgctaggagttttgactgaggctgccacatagacactctctgcctagcacagaccaaggttccagactaccaggagaaagccagtgtttggaataaaccacatagtgtgtgcagtgtgggtgtagtaaaccactctcatcagttagggttgtgggaaccatccccaaatccaaattctcagttgcagccaaaggctaaccttgtgaataggcttctcctaagaatgctggtttcaggcctgccctgttaaatcttttctgcacagtgctccatagccttctcacctgtgctccccatcttctaagctcagaggtcatcacctgtgctccagtgctgagaatcccaccccttcctccctctctgcttcatcttcccttataggttccaggtcattccctctctcaccatccttctcagcatgtcctttctgtggcatcatttctaatatgtgaacctgcccttcatcttctccatttcattcttgcatgtccagattctttgtgttttgttttgtttttaagacagggtctcactctatcgcctaggctggagtgcagtggcgtaatcacggttcactgcagccttgacctccctagttcaaatgatcctcccacctcaccctcccgagtagctgggattacagacatgcaccaccacgccctggtaatttttgtatttttagtagagatgggattttgccatcttgccaggctgggctcgaactcctgggctcaagcaatccacctactttggcctcccaaagtgctgggactacaggcgtgagccaccatgcccagcttttttttttttttttttgagaccgtctctgttgcataagctggagtggcagcagtgtgatcatggctcagtgcagcctcagccttcctgtcacaaatgatcctcctgcttcagcctcttgagtagctgggactacaggtgtgtacccccacacctggctaattttctttttaaatttttttgtagagacacagttgcactgtgttgcccaggctggtctcaaactcctgggctcaagcaatcctcctgtcttggcctctcaaagtgctgggattacaggtatcagccactgcacctggcctttttttttttttttttttttttgagacagtctcactccgttgcacaggctggagtacagttgcattatcttagtctcctaggctcaagtgttccacctacctcagtctccctagtagctgttactacaggtgtgtaccaccatgtccagctgatttttttgatttttttctttttcttttttaaaaattattttactttttttctttttttttctttctttcttccttttttttttttttttagagatggggtctcgccatcttgtccaggctgcaggctgctcaaactaactcctgggctcaagcaatcctgcctcaacctcctaagtgctgggattataggcgtaagccactatgcctgactttttgtttgtttgtgtgtccttttttttttttttttaatagagatgagatctttctacactgcccaggctggtctcaaactcctgagctcaaacagtcctcctgcctcagccactgaaagtgctgggattacaggtgtgagccactgtacctggtcacatgtctagattctgtaaacttgttccccacacccttctttattctcttatgaggaagaattgtgtttagctataaataccctaaaaccaggttggagcagctcaaaataaagaagcatttttcttgtaaaacaggagccctgagtctgctggtactgtcttggcatctcagaggtgccagggctgattgttctgtgattttcccaggctgtccttgggattacagtgcagctgcagcagctccagccatcacagttgtgctccatgcaggaaggaggggaagaggtaggaagaattctgccagccacatctgtccccttttggcagaactctagatgtcacctgctggggtctctttagccagaactaggtcacctcctcttgcactgaccctagttgctagagaggctggaaagctaggggtgtctagattgtcataattggcttgggcgagtcatggtccccttgctgtggcttgtgtgttggtaccctgaccacattctagagtaaatagcatctggccatgggatgtacaaccagcaatgcctgcagattagcctcccacccaaatacttctgatgccacccagggctttctgattctgcagaaaaacacatatgcccccatgatagcgtatgacctatcaactgggagtcgggtgaatctgctgcagaccctgttttcctgcccctttcatcggttgtcactgctgttacttcagacatgtatgtcggaagcaaattctcatcaccctggacatatgcctgtcactcacaagtcttatgccataaccaaatccaggatctaaaacgtgtgcccataaatactaagcaaaatgttgtgcttgcatggattaggagtatggggtcaaaatcatgatggacagtttcaataacttaatacctagacagttataaatactccagaagcagaaggttttcaaggctttatgttaagacagaaacatattttccatgtaatgctttgtattagtttcctgttgctcctgtaacaaagtaccacaatctaggtggcttgaaaaagcaccgatttggctggacgcagtggctcacccctatcattccagcactttgggaggccagggcagacggatcacttgagtccaggagttcgagactagcctggccaacatggcacaacaccgtttctactaaaaatacaaaaattatccaggtgtggtggtgcatgcctgtaatcccagctactcaggaggctgaggcacaagaatctcttaaacccaggaggtggaggttgcagtgagctgagatcatgccactgcactccagcctgggcgacagagcaaaactctgtctcaaagaaaaaaaaaaaaaaaaaggacagatttattttcttatagttgtggaggtcagaagttcaaaatggttcatcagggctagttcctctgacggcgcccagagagaatgcatttctgtctttctcagcagctggaggctgcccagactccttggttcatagacccttcctccatcttcagagtgcttcactctgacccatttccattatcacaaccgcttccctgactcagacccttctgcttccctcctatatggactctttggtcagatttagggccccaggataatctcccatttcaagattctttttttttttttgagacagagtctcgctctgtcacaaggctggagtgcagtggtgtgatctcggctcactgcagcctccgccttcccaggttcaagcgatcctcctgcctccacctcccaagtagctgagactacaggccgtgccaccatgcccagctaattttttgtatttttagtagagatgggatttcaccatgttggccaggatggtctcaatctcttgaccttgtgatccgcccgcctcagcctcccaaagtgctgggattaaaggcgtgagccaccgcgcctggcccatttcaagattctttttttttttttttttttttttgagacggagtctcgctctcttccccagactggactgcagtggcgcaatctcggctcattgcaagctccgcctcccgggttcacgccattctgccttagcctcccgagtagctgggactacaggtgcccgccactgcacccggctaattttttttttgtatttttagtagagacggggtttcaccgtgttggccaggatggtctctatctcctgacctcgtgatccgcccgccttggcctcccaaagtgctgggattacagacgtgagccaccgcgcccggccatcaagattcttaatcacagctacaatatcccttttgccacataaggttccagggattgggatggggacatctttgaggggccgttattcagcataccacatgattaaaatagagagtaaattttttttttattatttttaaggaaaagaagcctagtcaatagaagaagaccgcgtctctacaaaaaaatttaaaaattacctggcatggtggtgtgttcttgtagtcctagctacttaggaggctgagcggggaggattgcttaagcccaggagttcaaggctacagtgagctacaatttgcaccactgcactccaggctgagcaacagagcattaaaaaataaaggaaaagaggccaggcatggtggcttacgcctgtaatcccagaattttgggaggccgaggcgggtggttcgcttgagtccaagagttcaagaccagcctgggcaacctggcaaaaccacatctctacaaaaaatgcaaaaaaattagctgggtgtggtggtgcatgcctgtggtctcagctgttcaggaggctgagcccaggaggttgcagtgagctgagatcatgccactgcacttcagtctgggtgacagagtaagaccttatttcaaatataaaataaaataatggtgaagaatccctgtccaggcagatcccactcccagtgcactcacaggggtttgtgggctcagggatggctgggcgatctcaagcccctccttggcccctgtcactcgtctggcatcattccttactggttccctcttgcggttgctcagcttcacctgctgcaggtcacctcctggctgactacagtcccagctcttctcccatttcctctcttcatcaactgctcaccctctctctcggagactccatggcttcccatgtgccaggatcagtgagttgttctgggcagccaggagtcaggctggagttggagcctgtctcaacctcagtgctctttgctgttcctggccaggccagttcactagtgttctcaagtccccctcctccggatgttcttccgcactctcccagcaggcagcgttagtcttggctggggtcacagtgttgtctttagtctctgtgttttcgtccgtgttgtctctcaggcagtctcccagctcacgagcctgttccatggatgttcctgaggacctgccatgtgctgctgtttgtgctgtggatgcagcaaagaatgacaggaaaggctgagccctcactcagcatctgggagatggaagtcttgagagatggatgccagtgccaggcagtgatgaggccgtaaaggaaatgcacctggggagggcaagatggggtgctcatgccccgggactggcagggaggcctctctgagaaagtgactcaaactggggcacagggagcaaggtgggcagatgtctggggatgagggttcttggcagagggagcagcaggtgcaaagggccccaggaaggagtatgggggatgcattagagggatgtgaggagccatgtggagcagagtgggcgtggggcaagagtcaggaggtgagacgagccagggcatggtggagaagggcacagggtcgtgtccatcctcagaagtgactgcagagtgaatggaggagtgaccagggctggcttgcagtggggaggagggtgggtctgtttggttttgcataatagctttatcaagataaaattgacataccataagttcacctattaaaatgtaccactcagcggttttgagtatattctcagattgtgtgcagctatctttactatctaactccagaacatttcatcaccatcttagtcagcttggggtaccgtgacaaaataccaccgcctgggtgtcttgtacaacagacatttatttctcacggttctgtaggctggaattctaagagcacagtgccagctgattcgggccctggtaagggccccttcctcaattgcagaaggccgccttctctctgtgcccttatatggcagagagaggaagcaagccctgtggtatttcttcttataagatcactaatctcattcttaaaggccccaccctcgtgacctaatcacctcccaaaggcctcatctccaaataccctcacaatggggattagggtttcaacataggaattttgctatcgacattcagtccatagcagtcactctccgtctttcccatcccctgccaaccagtaacctactttctctctctatggatttgcctgttctagatattccatacgaatggaatcttacaatttgtgacctttgtatctggcttctttcactcagcagaatgttttccggcttatccatgttgtagcgtatgtcagtactttgttcttttttgtggctgcataatatcccgtcgtatggatagaccatattttgtttatgcatttgttgaggggcatttgggttgtttctacttttggctattaattaatagtgccactatgaacattagtgtataaatttttgtgtgaagtgacttatattttagaataaacctctgggtgctatgtagagagtcagtttttttttttttttgagacagagtctctgcttggtcgccgaggcgggagtgcagtggtgtgattttggctcactgcaaccttcgcctcccaggttcaagcgattctcatgccttaggctcctgagtggctgggactacaggtgtataacaccacacccgaataatttttgtatttttagtagagacagggttggccaggctggtcttgaactcctgacctcaagtgatcctccagcctcggcttcccaaagtgctaggattacaggcatgagccaccgggcctagccagagagtcatatttgggggccagaggtgacagagcaggaagcctggcacctggccagcctcagctcctccattatctctcccgttgtcaagctctcattcattcattccctcgatacgttccttcagcattcactgagagatatttttgagcttctactacttgtcatttctaggcactggctgtgaacattctagtgcggtgaggtgtacccagaatgaatgaacacatgacctgtattttggtcaggacaagagcagatgagggggcttgaagagggcttggggaaagcgggaagcctggcttataacagagtccctgtcctaatccccagaactggttatcttggatactgggtgagcaagagggtcagaatcagacaaggagatgtgacagcagaagcagaggtgagtgagagagatctgaagatgctgtgctcagctctagaggtgaaggaaagggccaggaatgcaggcagcctctaggaacgggaagatgcaaggattttccccagaacctcccgaagagaaaccagccctgccaacaccttgattttaggacttctgtgttccagaactataagataataagtgtgttttaagttacagcagcaaacagggaactcatataccttgacttcattgccagtgcatggcccacagcaggtgctcaataaatgtttgttgaatgagtggagccgtgtctgagggcacttgatgttaaaataagaggagaatcaggggacttgccagggcagctggttaggaccccatttcaatatcaggcctatggtgttggaggcctgtcccccttccgtttttttctcccaacagctcagagatctttgggttttctttcagcctgggagcctcgatctgaaagccaagcatcacgcaaggaagagggcctgcctgaagaggagccatcccatgtcacgggaagggaaggattcccgacagatgctccttatcccaccacgttagggaaagacagggagtgtcagagccagagtctggcactcaaggagcagaataacttgaagcagttggaatttggcctcaaggaagcaccagttcaagatcaaggctacaaaactctcagactcagggaaaactgcgtcctgagttcaagcccaaatccattcccagagatctctagaggggagtatttgtatacttacgactcacagattacagactcagaacataactccagcttagtcagtcagcagacaggctccccaggaaaacagcccggtgaaaacagtgactgtcacagagattccagtcaggccattccaattacggaactcacaaaaagccaggtgcaggacaaaccctacaaatgtactgactgtgggaagtcgtttaaccataacgcacacctcaccgtgcacaagaggattcatacgggagaaagaccttatatgtgcaaggagtgtgggaaagccttcagccagaactcctccctcgtccagcatgagcgcatccacactggagacaagccctacaagtgtgccgaatgtgggaagtctttctgccatagtacacaccttaccgtccatcggaggattcacactggggagaagccctatgagtgtcaggactgtgggagggccttcaaccagaactcctccctggggcggcacaagaggacacacactggggagaagccatacacctgcagtgtgtgtgggaaatccttctctcggaccacttgccttttcctgcacctgagaactcacaccgaggagaggccctacgagtgtaaccactgcgggaagggcttcaggcacagctcatccctggcccagcaccagcggaagcacgcgggggagaagccctttgagtgccgccagaggctgatctttgagcagacgccagctctcacaaagcatgaatggacagaagccctgggctgtgacccacctttgagtcaagatgagaggactcaccgaagcgacagacccttcaaatgtaatcagtgtgggaagtgtttcattcagagctctcacctcatccggcaccagataactcacaccagagaggagcagccccatgggcgaagccggcggcgtgaacaatcctcgagcaggaactcacacctggttcagcatcaacacccgaactccagaaagagctctgcaggcggagcaaaggcagggcagccggaaagcagagccctggctttgtttgacatccaaaaaatcatgcaagagaaaaaccctgtgcacgttattggggtggaagagccttctgtgggtgcttccatgttatttgacatcagagaatccacataggagagaaactttgctgatgacttttaaccacaagtaaaaaatgtggtaagtccacatagtgtactcatggaaggaggggctgggggtagaaatgtcatgggtgacttctgactttctaaggaaatgatgcttcccaagcacccgaggttggttggtcccaaatctatcaaactcagtgccctctttagcgacatattttgtgacattccttccattacaccacagtgagttcacaggtaatataacctacccacctgtgtaatgtcaaaaaaaatcaatatgcggccccattttgtaaaggatcattaaaatgaaagtaatttatggtagagtaaattgtagagtaacgtgtactgacttggtgcagtatttctccttgtcactgtgggcccaattttgccaggagacctagggcaatagcctgttgcttgtggactggtagagggtatgatgttgaccatggcaatactgtgaggggccttcccatgtggaacgtgaccttccaaagtagtgactaactcttggaaaagtttttaacaacataatatgctattgcatttctgggaaattctgggtaaattccaagcatgcagcaattagtttgtgcttatgtgtgaagtccagttaggttctcagttcataccctgaaaactgcttattccacatctgttgatgtggtccactgggggcagttctgttcctcaccatcttggcagcatgcatggctcctgcccacatttcaaccacacccccaacccaattacgtgaccagcccccacgaaatttcacagcattccgtgcaggggagtgtcacagctcctcttgaaaaacatctggtgttgctatgagccagaagttcttttttttgttttttgtctgagatggagtctcgctccgtcacccaggctggagtgcaatggcgcagtctgctcaccacaacctccgcctcccaggttaaagcaattctcctgccttagtcccccgagtagctgggattacacgcacctgccaccacgcccagctaatttttgtatttttggtagaaatggggtgttggccaggctgatctcaaactcctgacctcgtgatccacccacctcggcctcccaaagtgctgggtttacaggcatgagccactatgcccagctgagccagaggttcttaactggtggtgcttttgcctccagggcacatttggtgacatctagggacatttttggttgctgtgcctggaggaagggtgccgccgtcatgtagtgggtagaggccagggacgctgctcaacatcctttagtgcccgggacagctcctcaacaaaggattctctagctcaaatgtcaatagtgccaaggtggagaagccacctgggtataaacccagcccagaaatgtagctgacatttttaaaacttgcagccagctgtggtggctcacgcttgtgatcccagcactgtgggaggctgaggagggcggatcctttgaggtcaggagtttgagactagcctgggcccatggcgaaaccccatctctactaaaaatacacaaattagccaagtgtggtgacatgcgcctgtaattctagctacctgggggaggctgaggcacgagaatcgcttgaacctgggaggcagaggtttcagtgaaccgagattgcaccactgcactccagcctgggtgacagagcaagactctgtctcagaaaaaaaaaagaaaagaaaaaaaaccttcaaattgattaatcagggctggactagactagaaatcatataagcttgattttaacagatggcatcattagctagtttatacatgatgtactttttagtacatcctttacggttttgcagcattcataattgatgtgaaataaggaagataatcctttttttttttttgagacagagtctcactcttttgcccaggctggagtcagtgttgtaatcactgctcacttggcagcctcgacctcctgggctcaagtgatcctcccaccccagcctcccaagtagctgggaccacaggcatgtgccaccattcctgattttttttattttttgcagagacagggtctcactgtgttgcctaggctggtctcgaaccttggcgtcccaaagtgttgagattataggcatgagccactgtgcccagccacttatttttctgagtaacctttaaggatgtattgtggacattttcaaacatgagtcatatatttttgctggtactcccatctacctccccaccattctccttccctggatatatatataaccatgtttgtccactgggacaaaaccattttcacaatcatactaagctgtcatttcacatttttgctgtgcactgatagtgtgaaagcaatggcaggtaaaactgctgagcctgagttcaaagcagggcagtagccctgaggttggttgttcatattcttctccactgggaaatgcagtaaagaaaaagaaaagctaatttcacttaatttcttttcttttcttttttttttttttcttttgagacggagtctcgctctgtcgcccaggctggagtgcaatggcgtgatctcggctcactgcaacctccacctccacggttcacgccattctcctgcctcagcctcccgagtagctgggactacaggtgtgcgccatcttgcccagctacttttttgtatttttagtagagatggggtttcaccatgttagacaggatggtgtcgatcttctgacctcataatccgcccacctcggcctcccaaagtgctgggattacaggcatgagccactgcgcctggccctctttttctttttgagatggagtattgctctgtcgcccaggctggagtgcagtggcacaatcttggctcactgcaacctccgcctcccgggttcaagcagttctcatgcttcagccctctaagtagctgggatgacaggtgtgcgctaccacacccggctaatttttgtatttttagtagagatggggttttaccatgttggccaggctggtctcaaactcatgacctcaagtaatctgcccgcctcagtctcccaaaatgctggcattacaggcatgagccaccgtgcctggcctactttcactgaatttctgtgatgaaacgggaaaaattaattttgttaaatctcaagtagaactatattgtcattatcacatctaaacagatatcatcaaatacctagtgttcagatgttctgggttgcctcataaattttgttttctatttgtttcatagtaatcataatctaaacaagatccacacagtgcatttggttggaatttttcttttttctttttcttttttttttttgtgatggagacttgctctgtcacgtggttcactgcaacctcccaggttcaagcaattctcctgcctcagccgcccctgtagctgggactgcaggcatgcaccaccacactcagcagatttcttaattgtttgtagagatggggttttactacattgcctaggccagtttcaaactgggctcaagcgatcctcccaccttggccatccaaagtgctaggattacaggtgtgagccaatgcaccctgccaaacagcaattttttttttttttgagacagagtctcgctgtgtcacccaggctggagtgcagtggtgcgatctcggctcactgcaagctccgcctcccaggttcatgccattctcctgcctcagcctcccgagtagctgggactacaggcgcccgccaccacgcccggcaaattttttgcgtttttagtagagacggggtttcaccctgttagccaggatggtctcaatctcctgacctcgtgatccacctgcctcggcctcccaaagtgctggggttacaggagtgagccaccgcgcctggccccaaaacagcaatttgaataaccatgttggaatggttgagcattggaacgcattagcatcagaacttcccgtgtcaggccaggcgcggtggctcacgcctgtaatcccagcactttcggaggccgagatgggcagatcacgaggtcaggagatcgagaccagcctggctaacacggtgaaaccctgtctctactaaaaatacaaaaaattagcctggcgtggtggcgggcgcctgtagtcccagctactcgggaggctgaggcgggagaatggcgtgaacctgggaggcagagcttgcagtgagctgagatagtgcctctgcactccagcctgggtgacagagctagactccatctcgaaaaaaataaaagaacttcccgtgtccgtttttgctttttggatgctgggagtgtcacaactcagctatccaatcaaggcagagctggcctccaggatgccagagccagagctttgtggttcatctctagaggttcaacaggaccctgtggatggcccaagttcgtttctctgcacttacctcttcggggttgtcctcaaaacgttgccgtgtcagctctcacttttcacagcaactctggcctcctaccttggactgcgccacttctgtctccttagataacctccattcgcatagctaaatgctgcaccctccgacactgccacaataatagttctgtgagttagtaccattttatagataggcaaaatttggcacaggacaaaagttagtggtaactagaacaaaagtaaccagcccaagctaggaagtggtggagttagaatttgatgtcagcacccagctgaccatggcttaaacagatgaggctttgttcaaaggctgtcttttcagtggctcagctgtgtcacagtcgatgttttctgcaatctctcaacctttccattgtggtcatgaggagactcctatggctccagccattgcatccacagtgaagactgaaagaagggggaatgggcaggccaacacttaccgctgatggtgtttaaaggaaaaacattcccagaagcctgcagcacatgccccccttagtctcactggccacagatgggtcagggggccacccctaataacaacggggcttagaaacctcgtatttacctttctaacctctgtggtggagacaggtgggagagaaaagtcctgggaagtggatgatggaggcagctagccgtagctgctgcttttctcttcaagctcttgggagaattgcttgtgctccctattcccttggtggatgatggaggcagctagccgtatctgctgcttttctccttcaagctcttgggagaatcgcttgtgctccctattcccttggtggcagctcacacctcagacctgctgtccgcccccactgcttcacagaacccactgcaaccactgtccaaggtactacctctggtgtcgtctctcttcatccccaggactgtgaagcctgctaacctctttgcagagctccatctccttgcattgtggggttccttctaactcttcagggacttctcaacctcccgtcacccttcctaaatgctggggtcctagagtccaccttgtgctccacgccctccccaggtgtcatctacatccctagctttgtgctgctcaccaccaaatcagtctggtgcttctgagatttgggcttcagacccaaacaactgctgtgtgctactgggcaactccccgaggtgtgccgaaagctccccaaacccagcctaccccaaacaaaactcattttccacccagactagtctctgcttccctgatccctttcctggaggctgtttccacttgccatcccatcatggaagccagaaaaccagtcttcttgacctctccccttccccactccatggagttagaggtcctgttgattttgccatgtaaacatttcggatttgcttacttcatccccactgccaccaacagtgcaggatggccctaagaggagaagtaatgtgctaccaagtggcccagccagagtgtgaaccaaacagtctggtaccaaaaccctattctggatcattcctcctttctgctccaccagcagtttggggcacaggcttgggaatccagacaggaaagctcctcccctctgaagcagtgggaccaaaaatgacagcatggttctagacagctctggaagtcaggcctgtgattgcctcattccctccaccttggcccccaaaatggccagtcctgaaggggtcacagttgatacttctctgagggggcatggggttggctgaggttatagcagccccacagggtggtaagctgggatgaagcaatcaactggaactcaacaagccttgagttctcaaagggggtgtgggaaggttcttatacatcttctatgaagggcagtttatcagtcactaaattacaaatacataaaccctttgtctcaccaaacctgctgggaatgaatcctacatatatatttatatgtgtgcaggctacatggttttcattatgctattgattttaaaagtaaaaatttggaaagaacctccatgtccaccatggggaactggctaagtcatttatggtggaatggtgatcataaaaattcattaaaaatgaagactctatatacagcttgaatattccttatcgaaatgcttgggaccagaagtgtttcagatctttgcatattttctgtttctcatttcagttcacattttctaagcatgatattcctactgatttccttgtagatattttgaaacagataagaaactcctccgtggaaattactgttaactagggaaaagacatgtttttttctgttcataaaagtaatgcgagttctttgtagcaaaacttggaaaatgcataaaagtaaaaaaaaaatgaaaacttgtgtaaaattcctcatactttagccatccatagatggtccttaccattaggattttactaattttccttgcagctttttcttaaaatatacacgtgtgtctacacatacatagtgtacactaaattttacatacacacagaggaatatatatgtgtatagttatcttgtgtttagaaatttggaatcccttctagttgtcttgtaacatgtgcttactctattttgaggattttctctatgaatttcatgtagctctttaaattaactttcaggaggattgtaacaatgtgctctccacccagtattttaccagccttgagttttctcaaagggggcattggaggggttcttatacatttacagtgggaatgtgaattgatacaacttctgtggagggcagtttatcagccactatctaaattacacatacataaaccctttgtctaagcaaacttgctgggaataaatcctacacatatatttgtatgtgtgcagactgtttgtacatggttttcattatgctattgattttaaaagtcagaatttggaaacaaccctccatgtccaccatggggaactggctaagtcatttatggtggaatggagatcatagccttaaaaatgaagactctttatatacaggttgagtatcccttatccaaaatgctcaggaccagaagtgtttcagatttcagatttttgaattagggatcctcaaactatactaatgtgagaaagagctctaagatagttaagtagataaaagcaaggtgtcaaactgtagagtatgtttccatttatgtaaagaagaaacaggctaggcaaggtgactcacgcctgtaatcccagcactttgggaggccgaggcgggtggatcacctgaggtccggagttcaagaccagcctgaccaacacggtgaaaccccatctctactaaaaatacaaaagctgggtgtggtggtgcacacttctaatcccagctactccgtaggctaaggcaggagaatcgcttgaacccaggaagtggaggttgcagtgagccaatattgtgccattgcactccagcttgggcaacaagagcgaaactccatctcaaaaataaataaataaataagaaacatttgtttatatgtacacacataatctctgaaagggtaaaagtggcatactggttggccagaagaattgggaggacagtgatgaggaataattttcactctttatcattttatatttttggaattttgaaacatgtaaaattattaccagttcaaaaaataaatttaaacaaaaatcttaactgtttcaaattaaagtaagtttgataatttctttcattgtttactgtctgcatcccccatacagtgttcacatgagcagagagtgtgtgtcttggtcatattcatacttgttctatatatactcgtgtgtgtgtgtgtgttcagttgacagaaacagttgagtgtaaaacagcttcaactcgatgataccaaagatacaagataaaggtccctggagggtggctgtagcgcacacatacatttccaagttactttgttaaatttcctgtatcaatgagccccaattatgagagccccctacatacaagttttagccaatagccaagtcccccatttccagtgttatcttcatgtcctccaaggtattcaagttgtttctgcaatgggtaactgggaagaaatcagcatccagtctgaaaagcagtctcccataggtcttttgtaaggagatccaacatggacatcttccagaatgcactgtacaacatggtagccactagtcatgtatagctatttagatgtaaatttttttaattaaaaaaatttttcatttatagcaacagggactcactgtgttgcccaggttggtctcgaattcctgggctttagtggttctcccactgtggcctcccaaagtgctgggattacaggcgtgagccaccatgcccggcccagagctgatagaatttttaaagtccccctgtgatgatctgactgtggtaggagtagggaggtgtaacccgagtcagtatgcacattgggagcctcctccactaggtcatacaggccttctgcgtgtagatggaattatcatgtcccacactgtaccccggcacctccctcgattaaggtgatttgcatcatgcagggcctgcctgttatcagagagtctcctggacatacagaaataggaatgtacagggactgcatacacctgttgctcaatttctagctaaatggctggaggtgggggataaagaaatggcattcatacggtgtaatactagccatgtttcagaaagttttcaaaaaatgtttagtggagaaatgtgcagggtcagtggaagaaaacctgtaaaattatattatgattgttttatactctatacggacaagcctaaattggagggcattttggaaaactcgcttggatacatgaaaactgccaagatcattataaagaaacaacaggatccattctagattgaaagcaacttgaaatgagacagtagagtgtaatgcgtgtttagtttgtgcttgaataaaagacgaaaactacgtaagacattgggacaactggagaaattagcatatgggctggggattgggtacaggcttcaatgtcgttacttgggtgagttgaagaatgtacgtgttcttaggggacatctgcttaaggatatacaaggttcaggggggaaaaatatctccaaacgatatacttttatatctatgtgtgtacatgtgtgcgcgtagagaaagaaaaaagtacatacgctgtatatttcaaagaacatataaaaccatggatgtcaatatacttcccttccggtgcgctgcctgcgcagaaccgagaggttctgacgatccgcagctcccacgctccccttccggccccgcagcgctgtgaactccatttcccagaaggccttgtatcccgtgcatggccgtttccaggcaggaaggcgaagggccttctgggaggtgaggtcctgggcggccgctggccaccaggcggaagtgcgtaccggaagtgccggcggcagtgtgtaagacgctcacgggcgcgcggactatcgggcggctaggctctctgaggaggctgccacagtggtgagtggtgtgtggaggagaggcgagggtgattgtgagggatggagaggcgcccgtggcctaagtgtgctgatggtgggagtgaatgagtggacgggtgggacctgtgaggggaacgcgaccccgggtcggcgcgggcagagaggcgcgcggtgcgtgagggcgcgacctgccatgtcctgccgggtgtcaccgcttatgcgcccgtgggaggggagcattctgtgttggaggcagaaggaatgagggtcgtgaccaactcattataccactggaggctctatgagcaaaccgcaaactgttctcatgaaagcaggatgttggtaaactgacaaactgcgtctgccgccagaaggaatgctgggggcagtcatgtcccaggtcccctgctccttgaggttatctacaggaacatctggaacctgctgaacaaagaaagcagtcatgtgggcctgtgttaaatcaaatagctgaccgtcagttaccctttcctccctattcagtctacctaacaaatatgaagggctgtaaaagctcagggccctgttccctagaatctaggagccccctgaccccttctttcaaacagatccttttgtctttgtcttcatttctgccttcgttctccttcgtttggtccagaagcaaccgtgacaagtggtgcccgaccagggacctgaacgaggaaggtctgccagagcagagaaagtgaaactgatcagacgaactacgaacccctggacgggagagtctgccggcggagaatataaggtcagttccctgagaaggtatcgggagcgggaggtttctgaatcagggtaacatggggcagaatctgtctgttgaggagcaacattatgtgcagctgcttaaagttttacttaaacaatctggtgctcgggttagttctcaaacattaagcttctgcaggaggttattacacataacccatggtttctgcagacaggtactcttgctgtggaaaattgagactgagtaggagaaagattgaaacgagctcatcagaaagttcttaaagtggatccttctattttctctgcttggggtttggtctgtactgtcctcctgccattgtcctcttcttattctgccagacagcaggtgctatgttctgaatctcaaaaattgaaagaatcttttgtctcaccagcagcgcccattgaaaatgataaacaggagagggaggatgagaactggcctgtactgtcccctccagtagcagaaatagagaccccagtacaaaaaattctacatgctgtggccatagctggcgagccactaggaccttgcacttttcctattaccttaaggcctgatccaaataatccacagcagtttattcatgaacacactccagtaaaatttaaattattgaaagaattaaaagctagtgtggttaataatggaatacagagcccatttactttaggattgttagaatctgtattcagcactatgcgcctcccacccttggatataaagcatttagcttgcacttgtttctctgctagtgcatatttgacatggaatttaaattggcaagaaatgtgtgcagaccaggctagacagaatctcaccgctggacatgggaacattacagaggaaatgctattgggtagtgactcttattcagatctggtgcaacaattgacacttccagatgctgcttaccatcagtgcgcctggccgctaagcgtgcctgggccaccattcctgagaaaggggtctcaataaaatcttttccgcatatcatgcaaaaatcacaggagccctttgcacaatttattgcacagttacaacagtcagtgaggcatcagattcctcatactgctcctgcgaaaatgcttactttgaccctagcttttgaaaatgcaaatgcagattgtaaatgtgcattagcacccgtgagatgtacaaacagcttgggaaattttctcaaagcctgtcaggatgtgggaactgaactccatcgttcaactgtgttagctcaagtaatagctaatttagtagtgaacaaatctgaaaagggccaagggttgagccctaaagtgggaaaatgttataattgtggaaaaattggacatttcaaaaaagaataccatcagacctctgggcagaagggatcttacaatgcaataccgcccccccctccccgccccgctccccccaacacacacacacagaaaaaaaaacaccaggactttgccctcgccgtaataaaggaaatcattgggctaatcagtgttgctcaaaatttcatcagaatggcaccccgctctcaggaaatgagaatggggcctgggcccctcaaacaatgagggcattccccatccaggccacaaccctgctacaggggtgggttcctggaggaacattgactccctctcctctggaacaccggggagtgcaggattagatcgctcagtcagagaatgggtcacgttagttggaggagacaaacccaccagaattcccacaggcatttgggaacctttgccaacaggatatacaggattaattttaggccaaagccatctgaacttacagggcattactgtgatccctggattgttgactctgattatgaaggagaaattcaagtaattgtaatgtcacaagatctttgggtttttaaacctgggaaatatattgctcagctattgcttattattattctctgcaaattacacccttcttcacgaaaggagaaaagaggaaatcaagaatttgggagtacaactacacaggaaatttacctatcccaacccatagcttctaattgacccacctgtgcagtgcaaattaaaggaaagaagtgttgtgggtgtatggacacaggagcagatgtttcagtaatatccaaaaacaattggcccctgctactaacctctgcatccttagtgggagtaggaacagctcaaagtgtttaacagagtgctgaaattttactttgtgtcagtccagatggacagccatgtacttttcaaccttatgttgcaaatatacgtgttaatctctggggctgagatttacttacagcatgggatgtgagacttacaaatgaaaaggttgataatccaggatttaaaatattgaaggaaatgggatatcagagtgggaaaggcttgggaaagttcctacagggaaaccccggtccggtatcggtaactgggcaaacagataggaaagggctaggtcatcaggatttctgataggggtcattgatacttcttctccacccactgccttgctgctagagtggctgactgataaacctgtgtgggtggatcaatggcccctatcacaggagaaaactgactcaactccatcagctggtaagaaagcaattggatgcaggacatataaaagtatcagttagtgcttggaattcaccagtatttgtgacccccaaaacgtcaggaaaatggcaactgctgcataatttgagagctgttaatgcacaaattaaaccagtgggtgcattacagcaaggtctgccatccccggcaaccattccaagagattagcctcttgtagtaatagatcttaaagactgttttttcactataccattacacaagaaggacaagcctcaattcgccttctctgtgccttctattaatcagagagagcctgtctcttgtgatcaatgaaaagttttattaccccaggcatgctcaacagtcctacgttatgtcagcattttgtaggaaaagcattgaaggagcctcggaatatgttttccaccacctacatcattcattatatggataatattgttttggccactcctacagatcaagtattataccagttattcagagaaataaaatgggctttaactaaatggaatctcaaaatagctcctgaaaaggtacaaacaacctcctcataccaatacttagatactactgttactgaaaaaagtattcagcctcagaaagtagctcttcgtaagaacaaattacaaactctgaataacttaggggatattaattggctgcgcccaatgctaggtattgcttcttatcaactcactcatgtttatcaaaccctccaaggagattcttcattagattcccctcggcaacttactaaggaggcagaagctgaattacagcttgtagaaagatgcttcagcaacgacatgcctcctggctacaaccacaaaagtctttggttttgtttattcttcctaccccccattctccatcaggacttttagctcaattcatagacaaaactataatggtaatagaatggctttttttatccagtcaaacagtaaaatctttgcaagtttatcttgctttagtcacacaacttataacaataggcaggcatagatcaaaaatgcttacaggatatgatcctgataaaattattgttaccttggattcccaacaacaggctgcggcctgggagatgtccactgcatggcaaatcactttcgcagattttgtagaaataatagataaccattatccatcagacaaaattttgcagttttataaaattcacccttttattccccctgtgattgctcatcacaaacccatttcaggtggacagacctattttaccgatggctcttccaaaagccacacagccatttatggacctaaatatacttaaataataaagacccctagagtttcagctcaacactctgaattaatggcagttattcaagttttaaagctcacagctttatttcctattaatattgtctgtaattcagcctatgtcgtaaatgtagctagttgcattaaaactgccactatcaagagtgtacggaccagccccacagggtcggtgggtctctccctgtgtgcggcgacgagagagtgtagaaataaagacacaagacaaagagataaaaggcagctgggcctgggggaccactaccaccaatgcgcggagaccggtagtggccccgaatgtctggctgcgctcttatttattggatacaaagcaaaaggggcagggtaaagagtgtgagtcatctccaatgataggtaaggtcacgtgggtcatgtgtccactggtcagggggcccttccctgcctggcagccgaggcagagagggagaggagacagagagaaagacagcttacgccattatttctgcatatcagggactattagtactttcactaatttactactgctatctagaaggcagagccaggtgtacaggatggaacatgaaggcggactaggagcgtgaccactgaagcacagaatcacagggagacggttaggcctccggataactgtgggcgagcctgactaatgtcaggccctccacaagaggtggaggagcagagtcttctctaacctcccccagggaaagggagaccgccccccaccctttcccggtctgctaagtagcgggtgttgttccttgacacttttcgctaccgctagaccacggtcttcccaaacgctggcgtcaccactagaccaaggagccctctggtggccctgtctgggcataacagaaggctcgcactcttgtcttctggtcacacctcactatgtcccctcagctcctatctctgtatggcctggtttttcctaggctatgattatagagcaaggattattgtaatattggaataaaaagtaattgctacaaactaatgattaatgatattcatatataatcatatctaagatctatatctggtataactattcttgttttatattttattatactggaacagcccgtgtcctctgtctcttgcttcggcgcctggatggcttgccgcccacacaagagcaccttaaaaccagaactgcttaacctatttctgagactccaaaaagctgttcgctctcatgctgccccttttcatatttctcatatccgatctcacacacaacttcctggggccactatctctaggtaatgatagagcagataaattcatcagttctatatttcaacaagcccaagcttcccatgctttactgcatcagaacaacttgcccttactcgtatgtttcatctgcctcgcagccaggcttgagttattgtgcaagcctgccccacttgccagcatgtccctggtgttgcacctgtggaaggatgcaacccacgaggcttggctccaaatgaaatctggcagatggatgttacatatatatagcagcctttggctaactccgctatgttcatgtaatatagacacttactcccatatgttacatgccacatgccaaactggggaaacagctggtcatgtctgacgatactgtctgtcgtcatttgcccatatgggggtccctaaacaatttaaaactgacagtggactcgcttatgttagtcatgctttcccaattttttacaattgtgggcaatcaatcataaaacaggaattccatacaatccctgagggccaggcattattgagcgggtacatcaaacactacaacgcatgctgaaaaaacaaaaagggagaataggggaccaattaccacttcaaacaaaattacatttagccttgtttactttaaattgtttgactcctggtacggatggcaagaccccagcagaacgacactggcaactgctagaggaaaagaggcaagtttatccaaaagtgttatggaaatccccagaagaaggacaatggaaaggtccggtggatttgctgacgtggggacgagggtatgcttgtgtttttacaggagatggacaaaccgtgtgggtgccctccaggtgtgtgtgaccatggaacgggagaccggagggatccatggtattcaaccgtgggcctgttacctccagtacgagccatgagccagcggaatctgaatgcaaagacagaacaagggccgaccggagtcacaatgacatccaaccccataacatggggacagatcaagaaaacgacacaagaagctgagaaactactggagcgccagggtcaggcaaaaacccctgactccatgttcttggccatgctagctgtagtgtcctgtgcggtatgtttcccctgtgtagaggcaaaaacatattgggcatatgttcctaacccactggtagtacgactggtactctggagcgacactcctcctgagatatattatgatcagggagcgtgggcaccaggacccctaactccgtctgacacagagcaatagcatcaattacaccggcccattggaaggactccctttatgtatcaccatggatacgtcactcaactgcagctgtcttgcagtccaatctcaggcatggttaagtcaccatggaaaaattatgtatttattaggcctcagctttattaatgttactggcgtgttcaccaatcactcctagccccatcactcaaattgtatggattatatggaatgggctccctttgatatttctcacccccctccttggacccagtgtcttggccccttggccagacaacagtctatgttaatgggaaacattgactggggtccccgtggccatttagaggggagagatgaaaatcagacctcttggcacaaacttcactggcactggtggtggaccttcaacacctcttcatcacatcacactgggattcagtcccccagttggctgcacaacttgcttggtataggacaggctttaacccgcccttacctcagtgacgtcatctaggaaacagaggcccaattcaggaatcgatatggaaggcaacactcccatttatgaataacagcatctgggtcagaacattatccaacaatagtaatattactcaacacagttttaatatcacctttgtaaaaaatattaccactcaatttacggtttgtgggttttttgttgttgttgttaactgtttgagatggagtctcactctgtcgcccaggctggagtgcagtggcgcaatctcgggtcactgcaacctttgcctcccgggttcaagcaattgtctgcctcagcctcccgagtagctgggattacaggcacccgccaccgtgccaggctattttttgttttttgtatttttaatagaaacgggatttcaccttcttggccaggctgctcttgaattcctgacctcgtgatccacccgccttggcttcccaaagtgctgggattacaggcgtgagccaccatgcccggccagtttgtgtttttaatccctatgtttttctagcatctaagaaggaccaactccacgtaaacatcacccagttgacttgtgactcttgtcaactgtatcactgcctcaatcatagcacaatacaaacacacaacatatccactctaataattctgggtcgtatccctggattatggatccctgtcaatttgtgcaaaccttgggctgccacccctgctttacattttgtaaaactccttcttacccagctcactcatcgtgcacgtaaagccttaaacatagtaatttttactgtaatctccttagtcacactaataacctcggttgtagtgtcctcagtagcactacatagttctattcaaacagcccaatatgtagaaaattggacatgtacagccaaccaggcatggatgcttcaaaataaaattaataccgaattacaaacaaaggtagcaatgttaaaggctactgttctgtggctgggaaagcaggtacaaagtttgcaattgtagcagcaattgcactgtcatttcaatcatattcatatttgtgtgaccaatttggaatagaaccaaagtgaatatccatggaaccttgtaaaagctcatttgcagggagcttttacatccaatattacttttgatatcagtaacttacagagtaaaattcttaacttgaataagcaaactcaaaaataacagccctttttagaagcttaaacagaattccagcagggcttagaaagcctcaaccctggccgggtgcggtggctcacgcctataatcccagcactttgggaggccgaggcaggcagatcacgaggtcagaagatcgagaccatcctggctaaaacagtgaaaccccatctctactaaaaatacaaaaaaattagctgggtgtggtggcgggcacctgtagtcccagctaatcaggaggctgaggtgggagaatgacgtgaacccgggaggcagagcttgcagtgagccaagatggcgccactgcactccagcctgggtgacagagcgagactccatctcaaaaaaaaaaaaaaaaaaaaaaaagcctcaacccttggacctaccttaaacataacttcaatgtctcttttataataattacaagaataatgttgttatgtctctgtttttttgctcatagtctataggatcgggtgaaccaccaaccggcaattgaaagctgcacagcctgaaattacctttattcaattaatgcaaaaacaaaaggggagatgttggaggccgaaggaatgagggtcgtgaccaactcagtataccactggaggctctgtgagcaaacagcaaactgttctcatgaaagcaggatgttggcgaactgacaaactctgtctgccgccagaaggaatgctgggggcagtcatgtcccaggtcccgtgctccttgaggttatccacaggaacatccagaacctgttgaacaaagaaaggaatcatgtgggcctgtgttaaatcaaatagctgaccgacagttatcccttcctccctattcactctacctaataaatatgaagggctgtaaaagctcaggtccctgttccctaatatcaaggagccccctgaccccttctttcaaacagatccttttgtctgtctcatttctgcattcgtcgtccttcgttcggtccagaagcaaccgcgacagtcctgcatgtgttgatgccacctgtatgtgcaggtgtgacctcaggtgtgtgagtatccctcataccccttatcatcactgcctattcgctcttcctccagcctctggcaaccactaatccacgttatatgtctagatttgcctcttctggacacttcatataaatggagtcatacaatatgtggtttcttgtgtctggctttttaccactgaacgttttcagagttcatccatgttgtagcatgtatcagtttttcattcctctttatggctgaataatactgcattgtatggatataccacagtttgtttactcattagttcatagacattggggttgtttccaactctctgatattataaatgctactgctgtgaaaattcatgtacaggtgtttgtgtggatgtatatttttaatttgggaaggggaggccatgggtgggacctaggcttgtgaagagcctggcctgggtgtatctgtttgtccgaggagtgcctgtatgcatggccatgaccacacccactccttgctgcctgtgctcattagccatacttcattttccagaatcccaggcctgggcccctgaagtcaaagccaggagcctagagccacactgatgtgtaggatcaaagagaaggcggcagtggccctggaaacaaacctgtctctgcaagagtcactagcaacctgggacctctgcccaggactgagacctcgggtgccccctaccctgtagctgctgaggccaagcaatgtggagacagagagagggtgaggtgatggagcctgaggtgccgagtgaggtagatggtggggtggcagtcacagtggcacaggaggcaggtacagggctagatgttttcagaaaccagatatccctctaaaacacaccctgcttctgctgccttcattccactgccctgccttcctcagcctgctctacaccactacctcctcatggttctcctgcctcccgttgcccccttcatcactctccactcagcattgggtagagagggtcttttacccctgactgatgaggccacccctctctttaaaccctccatcactgcccaggccatcagagtatggttggcaaactcttctgtaaaacacaagcagcaggctgggcgcagtggctcatgcctgtaatcccagcattttgggaggctgaggcaggcctgaggttgggcctatgagaccagcctggccaacatggtgaaaccctgtctctactaaaaatacaaaaaattagctgggcgtggtgatgcatgcctgtaatcccagctactcgggaggctgaggcaggtgaatcgcttgttcccaggacatagagattgtggtgagccaagatcgtgcctttgcactccagcctgggcaacgagcgaaactctgtctcaaaaaccaaacaaaaaacacacaagcagcaaatgtcagctttgtaggctcagagagaaaaccaagaatgttacaaaggtacctatctaacaagagaaaaacatgtccatacattttattaataaaatccaaaactttgttaaatgtaattcattccttaatgagcaaaaagcttttcacaggaggttccattttatagataggaaacagaccccaagggaggtgagcagcccagaattacagcagagagtggtgaagatttgatcctagatctgacagcctctaccatcatacttgccattctcagcttaggaataagatggggaggaaggtgtgggtaatgggcaaatcagggcccaaatagtctgttcagtactcttgtctcgtgggaaggaacaaaaggccccacatctgcccttcctcctgggagtctctgttaggacctgaattcagtacagcaggaatgatcaatttttctctttagagcactcacccacttgacatctcactttgttctcacatagtcctcatagaggtatcctgtggctgctgtccttgaagcctgatagcatggagctgaggcctcagactataacagggcacataattttcatgaagttcaagaagaggctgggctgggcgcggtggctcatgcctgtagtcctagcactttgggaggccaaggagggtagatcacctgaggtcaggaattcgagaccagcctggctgacgtggcaaaaccctgtctctactaaaaatacaaaaattatcctggcatggtggcaggtgcctataatcccagctactcgggaggctgaggcaggagaagcgcttgaatccggggggcagagcttccaatgagccaagattgcactatttcaccccagcctggacaaaagaggaaaactacgtcttaaaaaaaaaaaaaaaaaattaggctgggacacctttcctggaagggctacttactacaggggagctgtctaaggtgctgaaatgtcctagccctgcgctgtccaatatggtagttatgattaaattcaaataaaattacaagttccatgtcccagtcacaccagctatgtttccagtactcaggagctacctgacactgatggtgccatattggacagcacaactccagaacttttccatcctcacagaacattctagaatttaatttgaatgctagttacacagggctgtgcatttaccaaattcactaagctgagcacttgtaattctgtaaaacatgtatatgtatttttgaaagcacaaagtttcacgtccccgcctgccagtcactttaccaaacaacctttggtttaacttctctgtgccccagtttcccaacctgtaaaagagagtaatgatacctcccctttgattggttgagagtaccaccaaaggtgtttgctgggtggcctgacctgcaggaggtgctcaggaaaggggagctgctgctgtcatttggtggaagtgggtccccttatctggctagcagatgccttgagttatggtgagtatgatggggacagactcccaggaggatggaatggcatcactctgtggaaagactgtgaaacagaacacgaacacctcatggcatctttgctgcctagagccatgccacttgcacaccctccttctgctcctgactcccaggaaggcaagggggtcactgggcttggggctccacagaaagaggcttcctgatttgatgcttaagagctgtgcctcagacgcctgcctctaaaacagaaagccgtccacacagacaccccacctcatctgggtacctcctctggacctaggctgggtccccacaggcagccacagccatctatgctgctgcccccacactgcctctggctgtgggcttctcgagggcttgctgtgtgatgctgagttccttaacgtggagacaatgtgttggagtgtggcagtgttcaggccctgctagccaaataaggggacccacttccaccaaatgacagcagcagctcccctttcctgagcacctcctgcaggtcaggctgctcagcaaacacctttgatggtactctcaaccaatcaaaggggagctatcatcattaccctcttttacaggttgggaaactggggcacagaaaagttaaaccaaaggttgtttggtaagtgactggcaggcagagatgtgaaactttgtgctttcaaaaatacatgtatattttttacagacgtacatgtgctcagcttagtgaggaaactaggaaacaggcccagagctgggatatggtcagtcagtggcatgaagagccgagagtggagcctggcaggaatttccagctggcatccatttgttactgaatatcagggcactcccccagagacacaagccacccctaaccacattctggaaaacgatctcacgtgtgtttccgtcctagatcaggggtgctcctgccaaggagagggtgtatgtggggaggcctgcagctgtttcccagaccttaatcagccacaaggagtccacgctggggagggtgtactgccatgtagtgggtgggaagatacctttggcaagaacacgtgccttgtgagctatcagcagattcccaacaaaaggagaccctgtacgtgcgaagagtgtggcaaggcctttggacagagaagtcaccttgttcagcacaccagtgagaagctgtatgcatgccaggaatgtgggtgtaccttcagcaacaattcatctctagtcaagcactggcacgtccacacaggcgagaagccctacatgtgtggccactgtggcaagtgcttccgagagagctcatcccttgccaagcaccagcgtgtgcacacaggtgagaagccatacgtgtgtggtgagtgtggacgcaccttcagcgagagcacacaccttgtacagcactggtgattccacaccggggaaaagccatttgcctgccaagagcagcaaagcctttgctgacttctcggccctccttgcatgccacggaacctacacgggtgagaggccctacgagtgccgggtatgctgcaaggcattcagccccagcttgtccctggctgagcacatacgctgccacacgggagagaagctgtatgcgtgtcaggaatgtgggaaagctttcagccacagctcatccctcagcaagcaccagcaggtacacacaggtgagtggccctatgtgtgtgcagaatgtggaaaggccttcagccaggggtcctacctgacccagcacctcaagatccacagcggtgagaagccgtacatacgtggtgagtaaaggaagccattcggtgactcctcagccctggtcctacaccagcgggtgcacacaggcgagcatccttatgcatgtggaaaatgtgggaagactttcagccacagcaagtttctcacccagcatgagcaagtccgcatgggagagaagcccttcatgtgtggtgactgtggaagagccttcatgcaaacctcatccctcgccctccatcagaggactcacaatggggagaagccctacaagtggaatgagtgtggcaagtcctgcatccagatgtcacacctcaccgagtattaccaggtacacgctggggaacgaccctttcagccgtggcacacacctcacgcagcaccagcatgtgcatgcatgtaccaagccattcatatgccatatatgtcagaaaaccttccaggaggccacaactcttgtactacatgagaggattccctggagagaagcccttttgagtgttgtgagtgtggcaaagccttccgccaaagcagattcctggcccagcaccagagaattcattcccagggaaaaccatgtgaatacatggatatcagaaagccctcagtgacgctttggttcttgtatgtcagtgaactgggcatgtgccaaatatggcagagatcttcccatctatccttggtgtgttgtcctttgcaccggggtggcaggtgaagagggactgtgagtgtgaggaaatcagggtcagtgtgagaagcccctattatacatttctcccttcagggtcaccggggcgggtgaggaagctgggagtgggcctaggatatgtctttcagatgtcacatggagatacttctccataattatcaaggggcacaatggccacttccactttaattagattcccatggatgctaaccaagtggtaggaggtacacaggtatgaacaggtttcctctcagcagtcctagaagactttatttcagtttttgccaagacaaaaatgaaatttaaaaaatgtgggtttttttgttttttgtttttttgtttttttgagacggagtcttgctttgtcgcccaggctagagtgcagtggcgcaatctcggctcactgccaacctccgcctcctgggttcaagtgattctcctgcctcatcctcccgagtagctgggattacaggcccccgccaccaaacccagctttttgtatttttagtagagatggggtttcaccatcttggccaggctgatcttgaactcctgacctcgtgatccacccacctcggcctcccaaagtgttgggattacaggcatgagccactgcgcccgcccaaaaaaatacatatttttaaaagatgcttttgcagttgtttgtgccttgtattaaggtagaccatatagtttggggttttattgcccagaaccaaaaaggtaaaatttatatgctgaagtgtgtgtcacagagtctagctctttaagaagaaaattttgtgtgttcctcagcttcagcatgaggacgtcactaaaactagttgagacagtgatgatgttcgttaagattttactgagcactttagaagcactttaagtagattgtcccattccatcctcttagccggcctgggatgtatttttattcccacttcatacatcagggagctgagactttgagaggttaaatcacttgcccagtgcccctagctaaaaggcactcacttttcaggacgaaaatacttgagttaatggataaggccaaggtggcagaagtatttccttcccttttaccaatgcccagaggtatttactggaattctagaactgaggaggcagttctagaatataaagtcctattgagcatgggagacaatggaatgattgggttccacctgaagaagcaagttgacccatttagctgacttgaggcaaacgcaaagtagtaactgggagccactgctcaatccagatgttgattaaatgcttcctgggagccctgcatgtgttcccactctcccctgtaacattgctcaggggttctctggctgtcaggctgagatctagcctctagctggcctctatgcgggggtccccaagatcctcaggtgtgaagattcactagaggaacatagaaaactgatatacttaacatttacggtttatagtcaaaggatacagattaaaatcacaaagataaaagatgcgtagggcagcaaccagaagagaggaggtacagctgttgtagagactgctgaattctcccagcgctgagtgacaatatagagtagcatcaaccaaggaagctcacccaagccttggtgttcaggacatttactaggtgatgatctagtgggcatggagtgcccacctgactgactttagtcacttagtctcccacccctctagtggtcagactgttacagtgtggcctaagatcctcaccataaatcacattgttgacaaatacttggcatggcccaaggtcctcaggtaaacaaagatactcttaggcagcatgatcaccacatgccttgaactgaaagaaaccagggtcacaaatgattttgttggctttctacatggaaggaaaagaaaccaaaagtattattgtagtggattgaattactagctcaattcttcactgctccttgcatatatacacccacggccatatttatggttcttcccagtaaaggcaaatttgatgtccccacccattccttgagtttgggtgtggccatgtgacttgatttggccaacagaatctaagtggaagtgatagcatgctagtcctgagtccaggcctaaagcccattgtgtctctgccatcaggatgagaagaatttttcctgtgagccttgcaagacaaatacagcagacctggacccaaactgcagcctagagccaagcccagctgagcccagcccagatcagccaaccctcagacacatgacaaaaataagcactttttttgctgtgggccacagaggtgtcgtagctgtttgttacagagcaatagctgatacaattgccaaattaaagtgaatactccctgaaaaagataaggtttgaaatctggggagaggataagaaagagacaaagggagagaggaaaggaggagcatccactcaggagagtccagaggccagaatgctgattgaacagagcacaagcacaaaaggggtggccaagggaaagggccttccaaggtctgcagtattgactacaggtgccatggtgggtgcaggagatgaatgaggagaatccagctatgcagctccaggcaagggaacattgttggtctgccagtcattcagtcattcctcagccaactcttagtacctagccctgtacaaggcatcaaggataccctggcctcggctatgtaaagggcaggacccctctcaggcctaacagcacagactcacaatctaggcagaaaaggagccaatgaggagagattccattggctttccaagtcaccctatacccattaaatgtcaaccagggctcttcttcctctccctgacaccagagtcccctccagctgctgccctatctcgctcgtttcctccttagaatctccctgaaaaggggtctaaggatccccacactgatgccactgtccattcacccgttatggactgaattgtgtccccccaaaattcatatattgaagtcctaacccccagtatacctcagaatatgactgtatttgaagataagacctttaaataagtaattaaggttaaagaagatatggatgggtcctaatccaacatgactggtgtccttataaggagagagagacagtaggggcatgtgcaaacagaggaaatgccatgtgaggacacagtgagaaggcagccatctacaagccaaggagagaggcctcaagagaaaccaaacctgttgacaccttgatctggggacttccagcctccagatctgtcagaaaataaaaaaaatttttttttttttgagatggaatctcgctctgtcgcccaggctggagtgcagtggcgtgatctcggatctctgcaaactccacctcccgggttcacgccattctcctgcctcagcctccctagtagctgggattacaggcacctgccaccacgcccggctgattttattttatttatttattatttattttgtatttttagtagagacggggtttcaccttgttagccaggatggtctcgatctcctgacctcatgatccgcccacctcagcctcccaaagtgctgggattacaggcatgaaccaccgtgcctggcccagaaaataaactttaaactatcgtttaagccaccaaatctgtggtattttgttatggcagtcctagcaaactaatacaccctcctcccacccataatcagagggcactatcaggcacctgggtcagccttgctcaccccttggacactgtagttcaacccatcaaccctatcatctataccaaacttgtccaacccacagcccacgggctgtatgtggcccaggacagctttgaatgcagcccaacacaaattcataaactttcttaaaacattatgagattttttttgcgatttttaataaactcatccgccatcattagtatattttatgtgtggcccaagacaattcttctaatgtggcccagggaagccaaaagagtggacacccctgatacaccttcaaaacagatccagatctgaccacctgttagcatctctaccacaccaccgtttgaccaccctgatctgagctacctgcctcaggtgccagtactctcaaagcaattgcatctttggtctccctgactccactctcatcttgacagtcttctcctgcagcggccagagaattcctatgaagagctaagtcacagcacagccctcctctgctcaaaggcctcccatagctcccacttctctcaaggtggaaatcaaagtctgtatgtgagccaagtgtggtggctcacgcctgtaatcccagcactttgacaggctgaggcaggaggattgcttgaggccaggagttcaaaagcagcctaggcaacacagtgagacattgtctctacaaaaaataaataaacaaagtcgtatgtggctcacaagcccttcaagatctgcccccacaggcctcccttttctgtccttgtcccctcccatctccttcccttaatccaccccagccagtcttcctcatccatgcctcctcctgacgtgggcatttgtgttccatctaccttgaacttactctccctgagttcttcgctctattcaggcctcagcttaaataccaacttctcagaaaaatgacttctttgtttaccatctgcctccccacacaataacatcacctccataaaggcaggccatgcttatcatcattgcagtatccaatctgcagtggtgctggctgcctgttgtgggtgctcagtatttatctgtggaaggaaaagaatatatgctcattccagctgctagcagtctgcagggcaaagtctgagaataataggggatgtgagcacaggctggggccaagaaacaccaccagcaccaccaagcaatcatacacaccctgcctcaaaaaggcctcacctgaacataggctgggccaccaacctctatgtatcgggccccaagccagagtctcctgctcaatgtctcttacacatacacacacacacagagaagatacattctcacacacagtccaggcatcgactgaatcacacaatcacactaccattcacagtcaccgtaacaacatcacacacagtctagggcctttatactgtgtcaggtccaccccattacctctaagtatctgtctcagacacaattacacctggtgcaggcaaacacagctgcatgattatcacatatgatgattaaatcacaggtcacacacacgcagagtaagcacacagaacaacccacaaacctggtcacagagtgactcatgcagacagacgcccagctcaaattcagtaaaaaatgatacacatttataaaaatgattacatgtgttcacagagagccacacatagctacactcaatacacaccctgacataggcaaccacaccgctcacctctcacaaaggcaccttcagtacttacacagacactcacacccacaagccctcagacaggcaccctctcccctcactcctaacatgggcaccctcacctctcacccaggtacccttgttactggtggagggtgtccaggttcttggcatcttgaacaaataattggacaaaatgcacaaagaaaagaatgaagcaacaaaagcagagatgtattgaaaatgaaagtacactccactgtatgggagcaggccggagcataggggctcaagagcccggttacagaattttctggggtttaaataccctctagaggtttccattggttacttggtatatgccctatgtaaatgaagaggacgaagtaaagttacaaagtgatttactccatgtacgccctgcataaatggagaggatatttcctaccatagctgcagtttccatttgatttacttctaggaagtccttaggttccctgcctccagacccgattttcttgcctcacccttacccctcacccctcacacaaacaccctcagccctcccaaagccaccctcagcctcacacagccgccctcaccctcagcctcacacaggcaccctcagctctcacacaggcaccctcagccctcacacagccgccctcaccctcagcctcacacaggcaccctcagcctcacacaggcaccctcagctctcacacaggcaccctcagccctcagccctcacacagccgccctcaccctcaccctcacacaggcaccctcagcctcacacaggcactctcaccctcagccttcacatttccctcacctccaagtcccgcctttcgcgcatcgcctgctgctctcccactcagcgccacctcagtcccacaaaggccgggctgggatcctgtggcctccgtgctgaccaacgtcaactacaattcccagcaggcaccgcgcctgggtacacttgagcttccggaggacgccgggaattgtagtcctggcgggcgtgggcccttgaggtgtgctgggagctgtggtccgggtcggcgggcgcgcaagttggctagtctctgcggccacctccggaagggtccgccggctgtgctggtgaggtgggtttcgggggtgttctccgtcctgatccaggctggagaggggcacagcaggtccagaagccgcgaacctctggggcggccagagcgagatgcggggtaccgcccagcgggtagagagtgagaggctgactaggggacgtgagtagacggactgcgagtgccggacacacgcgcagaggatgtgacggactgacggaccaggcgtggacggaccgtgtgtgcacggactgacggacccggtgtggacagactcacggaccgaatgtggtgcggaatgacacactgagtgccggacggaccgacggagaatgtgtcggactgacggagtgtgtgtcggatggactgattgaccgggtgtggggcggacgaagtgtggagcgggcggacagataacagataaaatgtaggaccagtggcctgggagggtgtggggcggacccgtttatgtgtctgataggcggttctgtgtctgacacctcttgggtgtgtgtatctgacgggttggagtgtgtgattctgataggttgagtgtaacactaaccatggagtgtgtgactgacagagatggttgccgtttgagacttcctacgtgggttgtgagatactgtgagagggtgagcgtgtgacggtgggatttcaagtgtgactgattttctttgtgtgtccttgagatggtgactaagattatgaatgactgtgatcagaataatactgtgtgatggaaatgctgcgagggcctgtgtttatttttgagacggagtcttgctctgttgcccaggctggagtgcagtggcgcaatctcggctcactgcaacctccatctcccgggttcaagcgattatcctgcgtcagcctcccgagtagctgggattacaggcaccggccaccacacttggctaatttttgtatttttggtagagacgggctttcaccatgttggttaggctggcccggaactcctgacctcaggtgatccacctgcctaggcctcccaaagtgctgggattataggcatgagccaccatgcctggccaggcctgtgtttatttgactgattataggtgacattgagatatttcctgtgtctgggtattttgaaggctgtggctgacagactgtacctgagataatatgtgttaatatctgattgactgagatttttatcagggagactaaaacttgggtgatccacaaacagtttaccaagcatatgagagaggatttgtgctttgccatgtctgcagctgaaactgagtgactagtggtcattcagctgggcttatggatatgtcccccagtgtttgcttacgtgtagcagggggctatggtatccatacatctactgcatgtttactgtgcaccaggcctgtgctggacacttataataaatcacctcacataatctcatagcaaccctctgaggtaggtaccattatcaggcttggtataatccatgtgtgagaaatgaaaagaaccaccctccttggttggtaaagcagctgtggatggggaacctcaacctgataggagttgaggttggctgaggaggctgaggaagtttcacatacatgtatttcagagaccgtcatgagggatttctccagaacaggtgttccaggggtgcaaaagagaacttggaagctgttgcagcatctattgtcatccctgccacccttgctcctccttcccctcatgattccctacattcttgggtaaccatgctcagcctttactggtcattccatttgcttaatgcctgcttattgtgaacctgctatagggcaagtcctgtgtgctgtggctccaggacagcccagcctctctgaggaaacagtacagaactagcaaagagttacccagggcactctgggaagaggacttagactagtaccaggtatctgggatgacacctgaggaaagtggcagctaagatgaggcctagagagcccagaggaatccgtcagagacggatttcagaactcgagagcagcaggggcgacaaggggcttagaaaggccacaagagacccaggagaactttacagtgcggcgaaggggcttaaacgcagcttggccagaggccaccagaggtcaccagcggtcaccaaaaggtttcaggattggggtcttgttttagagtaacgttctcttcttcctgtgcccaaggccattgctctttctcaggcctcctgcatctctgtccagggtgacttccttgagcagagactccaggcacactgagcgtcctggctgacattgaaggaaaggaaaaagaactccaaatacttaaaactgtgggagtcgtggatgggagagggagaggctaagtctttgagtaaggagtagtatgtggccaaagcaaagtgtcgaggtctcctaggagaggttacacttaatttagggtattcttcctgactataagagaaaacaaattcactgtgggaagtagagaatgtcaagaaaagtaatacagtagtcacccctcatcttcagttttggtgaatatagtacaataaaatattttgagagagagagaaagaccacattaatatagcttttattacagtgtattgttataattgttctattttattagtcattgttgttaatttcttactatgcctaacttatgaactttatcaagggtatataataagaaaaaaatatagaatatataaggttcagtaatatccatggtttcaggcatccactggagggtcttggaacacatcccctgcagataagggggaactaccatagtataaaataccttggtaaggatgtagagaaattggaaccctcatccacaactggtgggaatgcaaaatggtatagccaatttgcaaaacagcctggcagtttcttaaaaagttaagcattgcctacatgcggccaggcgcagtggctcatgcctgtaatcccagcaatttgggaggctgaggtgggcggaacatgaggtcaggagatcgagaccatcgtggctaatacggtgaaaccccgtctctactaaaagtacaaaaaaaaatagctgggtgtggtggtgggtgcctgtagtcccagctactcgggaggctgaggcaggagaatggcgtgaacccaggaggcagagcttgcagtgagccaagattgcgccactgcactccagcctgggcgacaaagcaagactccgtctggagaaaaaaagaattttttcaaaaagaaagtattatctccctctgaatgtcggtagcacccccatctagaaatggggctagattctgagaagtagaattaatattgaggcagagagcacagtcattttaaagctcttacaacatactgccaaattgtttgccaaagatattctaattgattgccctcaccaatagtacatgaaagtagttttttgctgtccctgaccagcattcagtgctcacagttctagaatttggaaaggctttgagtgtggaggaaagatcgcagatagcctgagctcaaacactagctttgttcctactgaccagatgactctagcagctgactttccccaacttggaaaatgggagtggtaatactgactcacagggtggagctaaggcttgaatgggataacagatgccaaaggctagtgtggcctggtagccggtaggttcccactgactgtctgttcccattttcttttattcctgttgcacactatacccatatccatcatcataattatcttatcatgtgttggtcgctgtccttccgttgaggccattgagcccagcacccatgccttccccgtatttgcattcctagtacagtgctgggcacagagtaggcacctaatggggctgtgctgaacaaaagtattattattgatgtatgtgcccagcaatgctgtagacactggggataaagcaaagacctaaacaaaaacccctgcccttaatgtgctgatactccaacagggacaagtaaataataaacaagtaaccacatacgtgtatcacacatcaggtggtaaagagcaaataaagcagtgtagaagcacagagacttactgataaggcgtcttttgtgtagaggcctgacttaaataagggagagaacacccaacaattatcaaatgcactttttttttttttttttttgagacagaatctcactctgtcggccaggctggagtgcagtggcacaatctctgctcactgcaacctccacctcccgggttcaagcaattctcctgtctcagcctcccaagtagctgggattacaggcccccgctgccacgcctgtctagttttcatatttttagtagagatggggtttcgccatgctggccaggctggtcttgaattcctgaccttgtgatccacctgcctcagcctcccaaagtgctgggattacaggtgtgagccaccgcgtccagctgacgttattattattattattattattattattattattattattattattttgagatggagtctctgttgccaggctggagtgcagtggcgtgatctcggctcactgcaatctccacctcccgggttcaagagattctcctgcctcagcctcctaagtagctgggactacaggcacacgccaccacgcccagctaatttttttgtatttttaatagagacggggtttaatcatgttggccaggatggtctcgatctcttgaccttgtgatcggcccagcttggcctcccaaagtgttgggattacaggcatgagccaccgtgcctggccaacattatttttttaaaagctgtatttttattttattttattttttgagatggagtttcactcttgttgcccaggctggagtgcaatggcagaatctcggcttactgcagcctccaccttccaggttaaagggtttcttctgcctcagcctcccaagtagctgggattacaggcatgcaccaccacgcccggctgattttgtatttttagtatagatggggtttctccatattggtcaggctggtcttgaactcctgacctcgtgatctactcgcctcggtctcccagagtgctgggattacaggcgtgagccaccgcgcctggcctccagaacatttttatcatccccaaaagaaattcccaaacctattagcaaccactctcatttttgtctctcttcagcctctgacaaacactaatatgctttttttttttttttttttttttgagatggagtctacctctgtcgccaaggctgtagtgcagtggtgtactctcggctcactgcaacctctgcctcccaagttcaagagattctcctgcctcagcctcctgagtagttgggattacaggtgcctgccaccacacccagctaatttttgtattttttagtagagacggggtttcactgtgttggccaggctggtcttgaactcctgacctcaggtgatctacccacctcggcctcccaaagtgctgggatcacaggtgtgagccaccgtgccctgccgtgtctttcttcttttacttagcatcatgttttcaaggttcatccatgttgtagcattaatcagtacttcatttctgtttatggtgaatagtgttccattataggtatatacagcattttatccattcatcaggtggacatttggattgtttctccttttttgctgttatgagtaatgctgttatgcacatttatgtataaagttttgtgaggacatatactcatttctcttgggtctatacgtaggagtagaattgctaggtcatggggtaactctgtttaagcttttgaggaactcccagactgtacttcccacagtggctatcccatcttacattcccagcagcagcatatgaggattacagtttctccatatccttgcctacacatgttatctgattataggcatcccagcaggtgtgaagtgctatctcattgtggttttcatttgcagttccctggtagctagtgatgttaagcatcttttcatgtatttattgcccatttgtgtatcttccttggagaaatgtctagtcacattctttgctcattttaaaattgtattattcatctttttactatggagttgttctagatacaggtcccttatcaaatatatgatttgcaaatattttctcccactctgtgggctgcttttttactttcttgatgtggtccttcaaatcacaaaagcttttaattttgataaagtccagtttatttattttttcttttgttacttatgcttttggtgtcatagctaagacagctttgcattattttcaagtattcatggaacattaaccaaaattaaccatacactgggtcacaaaccaagtttcagcaaattttaaatgatcgaaatccattgtagcatgttttctgaccacaacagacttaatctagacatcagtaataaaaagacaactagaaaacccccagttgtttggcaatgaagcaggagagttttaaataaataaccaatgggactgggcatggtgactcatgcttgtaatcccagcactctgtggggccgaggcaggcagatcgcttgaggtcaggagttcgagaccagccccgccaacatggcaaaaccccgtctccactaaaaatacaaaaattagcctcacatggtggtgcacacctgtagttccagctacttgggaggctgaggcaggaggattgcttgaacccgggaggcggagttgcagtgagccgagatagcgtcactgccctccagcctgggcgacagagggagactccgtctcaaaaaaataaaataaattttaaaaaataattaatgagtaaggtagaaattgtaacagaaattagaaaatatttttaactaaatgataatgaagatacaacatatcaaacttgtgatgtatagctaaagctgtgtttagagagaaatttatagccttaaatatgtgcattagaaaagaggaaaggcgaaagtcaattatgtatcaatctcaaacactacaaaataattagcaagtaaagtgagagaatgaccatgtggctacctggggaacagagggagaaagacttggctctgttggggaggagcacgccttaaacaggctggctgtaggtttgcgtgggtttgtagcttagctctctgttaacccttcactagctgagggactttgggcaaatattttcctcctgagtgtctgtttttccatccataaaataggtagaaagtcccacctcctgagtttgttgtaagttttttgtttgtttgtttttgttttgagacagagtcttgttctgttgcgcaggctggagtgcagtggcgtagtctcggctcactgcaagctccgcctcccgggttcacgccattctcctgcctcagcctcctgagtagctgggaccacaggtgcccgccaccacgtctggctaatttgttttgtatttttagtagagacggggtttcaccatgttagccaggatggtgtttgttgtaagttttaaatgagtctacatgcaagcagtagtagcttagaacagtgctcagcaccaagtgggtgctgtcctaattatgaggattgtctatgtctttgtgagagtctttcacatctcacgggccacaagcctgtgttttccctgctctgtaggcatgaggcagggcccaggttccatgtgatgctgaagctctgacattcctgcaggcccagttccaaggctccggcatcctgtgtctcactgagcactgctgcccgatggccatccccaagcactccctgagcccagtgccgtgggaagaggacagcttccttcaagtgaaggtggaggaggaagaggaagccagcctctcccagggcggagaatccagccatgaccacattgctcactctgaggctgcacgcctgcgcttccggcacttccgctatgaggaggcatctggtccacacgaggccctggcccacctccgagcgctgtgctgtcagtggctgcagcccgaggcgcactccaaggagcagatactggagctgctggtgctggagcagttcctgggtgcgctgcccccagagatccaagcctgggtgggagcccagagtcccaagagcggagaggaagccgctgtgctggtggaggatctgactcaggtgctggacaagagaggtaaaggggcgccgtgggcagcttcacggcacaccagagatacaccctggacaggaacatgggagcacagggctctggtttggggttgctcatgcacccattctcacatttgtactttaccgtaactctcacacactgttgtagacaggtgtgttttggttgcaggtgaccaaaagcgagctgaaatgggctgaagcaaagaagggtaaggaggcagcagatacggctatatccagaagatctgttgacagcatcagaactctcttcttcctctcttgttctgtttctcagttggttttttctgtgttagcttcattcttattttaggttctctttccaaaggggttaaagatagccaggaaccccaggcttatgtcttaccaatgtagaaaccccggggtaataacaataagaggtccctggtctgagcccccactggcctggttgggatcttatgtttgtgtttggccaaccaaatcccagggactaacagtgagcaactggctgtttctcagaggaaaccagacgagggcctgggtgcctggggtggctgttgggggtgacggaaataccagatgtccctgtgtaccttctctatgcccaccctgggctggcctccaggatttgggtgggtcagacctgccccaggctcagctgggcactgttactcacagagacccacacaaacatcccaacccagggaggtccagtgggatgcagggaagacccagccttgggacaatccagagcagggagtggtggctcgtctcagatgggcttggcctggcctattggcaacagataggaggtgggcataccacacactgggaggaaacgtgcagtgtgcaggaggaatgtggagtctggatacagctgcatcatcaaggctcagtagatccaaccgctgctgctcttcctggccatgtgactcccttgtgcctcagtttactcatgggtaaaatggggattgtaataaaaacgcccaccttagtggtgttgcgagatacaaggcaatacccgtgcagcacctgaaatggtgcctggcacagattaaataaatggtaactgcaactgttaggataatttgttcagctctgggagaaacaggcctctctggaacagaggttggtctatgcccaagcagatgtcacagagacagggagaggaaggagggagtggccccatcctcccacagggttggccaaagctcagagaaagggtaaaatgcagagggaatggtggggtcaaaggcctggcagtgtgatttgcactggtgtattctggtaaaagcaggtggtgtgatgtttctggatagaggaaggaagggggagacagggccaagcagatggctgggggagcaggggagactgcctgtggacctggaggagaacattctggagctgaaatcccaactgggccactagctaactgtgatcctgtaccagttactcaacaccttccctcagctggatttcagtttccccatctgcaacagaatcacagcagtacctccttctgagagcaggtcgaagctgaaatgaggcgatggaagtcacccactgtgcttggggcccagcacgacaagagcctgatagtggttagtggccctggaaggccagcggcacagcatccatggcttacagatggggagactgagtcccagatgagggcaggactgattaaggtggtagacctggggtttgagtccagtttctgcactgctgagccccactgtggacttgagcagtgggtattccacctgtctctgcctcctccctggaatccatccagtagatgtgccagattatgtgtcctttgcacccatgcagggcaggtcagtgcgagcattcctctacctcatgcacactctgatctccaagagcacctccgccacactctgccttcatagtactttacaatgtaggggcttgagaggccagatgggtacctcatgtactcacccccagcagccatattctacctggggttctacttgcagaaattttcaccatcgtgggcttctggatggattccctcattcagccagaattcactgagcacctgtggacacatccaggcctagaggcaaggtgttgagtgtgagggacagaaccgcaacctcacagagatcagagcctgcaggggacacatccaggcctagacgcaaggcgttgagtgtgagggacagaactccaaccccacagagatcagagcctgcaggggacacatccaggcctagacgcaaggtgtcgagtgtgagggacagaactccaaccccacagagatcagagcctgcaggggacacatccaggcctagacgcaaggtgtcgagtgtgagggacagaactccaaccccacagagatcagagcctgcaggggacacatccaggcctagacgcaaggtgtcgagtgtgagggacagaactccaaccccacagagatcagagcctgcaggggacacatccaggcctagacgcaaggtgtcgagtgtgagggacagaactccaaccccacagagatcagagcctgcaggggacacatccaggcctagacgcaaggtgtcgagtgtgagggacagaactccaaccccacagagatcagagcctgcaggggacacatccaggcctagacgcaaggtgttgagtgtgagggacagaactgcaaccccacagagatcagagcctgcaggggtgcatgtgctcagggtcctgacaaggacagaccctccctctctctctgtctccagatcagttccacatcagggtttctcctcttgactcttgagccaaaattgggagccttgaaagatggcgagtttggtgggaggaggagaaatcagaacccatggtgtagttttggatggtgtgggaggacagccctgcaccctttgtcatccaagacaccaaatgagaaacttccccttggaactggggccagatgttaggaacgggccacatctccccttacaaagtgtgaccggggccctcggcagagtaggggaggcttggtgtggtaggaggagtgacagtgtggttcggactgtttcaggatgggatccaggagccgagcccacagaggcaagctgcaagcagagtgacctgggagagtcagagccatcaaatgtcactgagaccctcatgggaggtgtttcccttggacccgcctttgtcaaggcatgtgaacctgagggcagctcagagaggtctggactatcaggggagatctggacaaagtctgtcacccaacagatccacttcaagaaaacttcagggccttacaaggatgtccccacagaccagcgtggccgtgaatctggtgcctcgaggaacagttctagtgcgtggccaaacctcacctcccaagagaagcctccttcagaagacaaatttgatctggtggatgcttatgggacagagcctccatacacctactcagggaagaggtcctccaagtgtcgcgagtgtaggaagatgttccagagtgcttcggcgctcgaggcacaccagaagacccattctcggaagaccccatatgcctgcagcgagtgtgggaaagccttcagccggagcactcacctcgcccagcaccaggttgtccacacaggggcgaagccccatgagtgtaaggaatgtgggaaggccttcagccgagtcacccacctgactcagcaccaaaggattcatactggagagaaaccctacaaatgtggggaatgtggtaaaaccttcagccgcagcactcacctcacccagcaccagcgggtgcacacgggggagcggccctacgagtgtgacgcgtgtgggaaagccttcagccagagcacgcacctgactcaacaccagcgcatccacaccggggagaagccctacaagtgtgacgcgtgtggccgagccttcagcgactgctcagccctgatccgacatctgagaatccactctggagagaagccatatcagtgtaaggtttgtccgaaggcctttgcacagagctcctccctcattgagcaccagaggatccacacgggagagaagccttataagtgcagcgactgtgggaaggccttcagtcgtagctcagccctgatggttcacttgcggatccacatcacggtgctgcaatgaccggaagtcgcccctgggggcgtagcacagcgtcttctcggaggctcgaggtctaagagaaacgctgagttcctgaagagccacagacagggtgggtgattgatgagttgtcaaaatgataggtgcctgagggcagactcgggctgtctaggaaccactctgcatttgaggaaccctgatgagcacaaggtgattcaggccagctggagaagcttccagaagggccctgcactgctaccctctatttcccactcagggctgtcccagagagaaggcagccgaactgaggatttagactggttctgagggccagggcaaatgaaggcgcatgtctctcagaactcagcgtcccaagacgctctgggcgggccaactgtagcttgttctcatgtggttcttcttgcctgcttttctgctgcttagcccagaacggacacctgccatgcccacctctgtgccttggcacctactatttccactccagactattttgtgcctaactgcaaggctgacttttgagactgcctcttccacgatgccttttctacactctgcctctctcatggtttcctgtcgtaatcagtggtgctgcttgacacctgcccagcatgttcctgtctctccttttccttccacatcccaccagtcaccagcgctattgttttaacctaaagcttatctgtaattcacctccttttccaccactgctaccttatgtgagccctcattgcctcttgcctggattatagccggggtctccttcctgaccacttcctgcctttattctctgcccctgtatcactctccaggggactcttgatattacttagatctgactgtgtcactccaaggtggaaagctctccaacccatcttctacagcacagcttcctgaacagggtataagtatgctgagatgcaggctgctctgggccccgagcaacctctccagttatcctcatatgcatgtatgaatactgtcatttttctgtgcgtgcagtgaaaatggcctcatctcataccatggctccaccttccatacaccagccacacggaactactgtggtccctgaaggagccatacattttcccacttatgtgcctttgtacctgtgcctggaaccctcctcttctttttctttttcttttcttttctttttttttttttgagatggagtctcgctctgtcgcccaggctggagtgcagtggcgcgatctcggctcactgcaagctctgcctcccgggttcatgccattctcctgcctcagcctcccaagtagctgggactacaggcgcctgccaccacgcccagctagtttttttttttttttgtatttttagtagagatggagtttcaccatgttagccaggatggtctcgatctcctgacctcgtgatccacccgcctcggcctcccaaagtgctgggattacaggcgtgagccaccgcacctggccctcctttttcatctaaggtgtttcaaatgttgcccaaagaaacctccctgctctccgggagcagacttcagcttgccctctctgcttccagagcacctcctagatacctctcttacaactcctgccaccttgttttacttatttgctccttgtagagctgccttttccaaggataccataaactcctgagagcaggggccatgtcttactctcagtatctacaacacacaagactcagtaggccctgactgatgtctcttacatgaatgtgactggtgcccccaggaggcagtcaccgtgctgtctctgccccacattgtccttatgtatgtttacatggatgtctccccagcagcttgaaccctggagagcaagaataatctgattttcctgggggccagcacccaaataagcctggcatgcagtggcctcaataaaatgtgactgtattgagtcattttctagggccccagatcccctggtgtcatggacttagtctttgccagcattctgtccatgtgttctctggtcttctctcacaatgctgcatccctgtcccatttttagggtccctgtctatcactggatgctgcagcttctgttcattactgttagtgtatcattcttcatgcctctgtttctgtgatggtctcatcatatgtgaaccatttgacctggcgtattgtgtactagtcaccgtcaccatctctccatatgtatctccctgtatttcgggcccattccctctatgtcaagagtaaatagaggcacagagactgatgagaaacgttcataacatgaaggtaagactcagggagacagagactttgtggaagtatctctgagggagtcccagacacaggcagagagggccacatatcgtgtgccagaggctgagagactgagagggatgacaggcttaggggaaaactcagagaggagagatgcacattcctagtgaaattgcacaggcttccagcatgctggagggaacagaaaaggcatgggcctgaattcaggctgcagagcctgactcctccctgtggctacttttgggacctaagataagtgactttcctgaacctccatgacctcctcatatgtaaaccagggacaggacccaccttgtgtagtgcctgacccaaagcctggccctgcacactgtctctgactcacagcaatcatcagcacctctctttgcctcctacttgctcagtctctgtcacaagaactggatctccatccccttgatgctctgagcatcttcacccatttggtcgttgagacatatctgtccatgtctgtctaaaaggggaggagatgagggagaaaaaagggaatctactcagagcctgtgtgtgctgcccagtctaccaaataatttatatacatctcagtcctcacacaaccatccctgttttatagaggaggaagtggcttagagaatgtaactgaccaaagtcacactgccaggaactggaagcactaggatttgacagcatatccaaatatgtcagcaatttcaataaacatgactgtactcaacaaaccaagtgtaaagacaaattctaacagactgaatttctttttggaccagccatatgttctttagaaaagatacacctaaaacaaggatatgggaagttgagggcaaagggatagaaaaggatatacaaggtaggcatgaaactgaagaaagctgatggagctgcattagtcgcgcaaaacagacattaaggtataaaagcattttaagaatcatggggtcactatgtttttataaaagaaacaatctattaggaagatgtaatagttcaaaaccaggcacataatatgagtcttgtagaacagaatcacagtgagaaactgacgaaaccttaagtgtacttggaagtgctaacacgttctttatgatagaaaacatttgaagaggccgggtgcggtggctcccacctgtaatcccagcactttgggaggccaagacaggcggatcacgaggtcaggagtgcgaggcaagcctgggcaacatagtgaaactgtctacaaaaaatacgaaaattagccagcctgggccgggcacagtggatcacacgtaattccagcactttgggaggccaagacaggcaggtcacgaggtcaggagattgagatcatcctggctaatatggtgtgtaaccccttctctactaaaaatacaaaaaattggccaggcacggtggctcacgcctgtaatcccagcactttgggaggccaaggcaggcggatcacgaggtcaggagttcgagaccagcctgaccagcgtggtgacaccccgtctctactaaaaatacaaaaaattagctggatgtggtggtgtgtacctgtaatcccagctactaaggaggctgaggcaggagaatcgcttgaacccaggaggcggaggttgcggtgagccaagatcacaccattgcgctccagcctgggcaacagagcgagactctgtctcaaaaaaaaaaaaaaaaaaaagccaggcatggcggcacacgcctgtagatccagctaatcaggaggctgaggcaggagaattgcttgaacctgggaggcagaggttgcagtgagccgagattgggtgacttcactccagcctcgacaacagagtgagactctgtctcaaaaaaaaaaaaaaaaaggctgggcacagtggctcacacctgtaatcccagcactttgggacgccgaggtgggtggatcacctgagttcacgagtttgcgaccagcctggccaacatggtgaaaccccgtgtctacaaaaaattagccgggcgtggtggcgggtgcctgtaatcccagctactcaggaggctgaggcaggagaattacttgaacctaggaggcagaggttgcagtgagccgagattgcaccattgcactccagtctgggcaataagagcaaaactccatttcaaaaacaaacaaaaaaaagactcaacccagaattctttttttttttttttttgagatggagtctcgctctgttgcccaggctggagtgcagtggtgtgatctcagctcactgcaagctccgcctcccgtcaacccagaattctatatccagtgcaaacacacttaaagaacgaaggcaaaatacagacatcctcaaatgaaacaaacctaagatatatatttcttgccagcagacttgcctgaaaagaaatgccaaaggaaactcttggtagaagggaaatgataccagagggaaagcgggaactttgggaattaaatgatagtaatagagattgcacaattattttatctttaaaatatggctggaggcggctgggcgcggtggctcacgtctgtaatcccagcactttgggaggctgaggtgggcggatcccaagggcaggagatggagaccatcctggctaacatgttgaaaccccatctctactaaaaatacaaaaaaattagctgggcgtggtggtgggctcctgtaatcccagctacttgggagactgaggcaggagaatggcatgaacctgggaggcagagcttgcagtgagccgagatcacgccactgcactccagcctgggcgacagagcaagactctgtctcaaaaaaaaaaaaaaaaaaagaaaaaaaatgtggctggaggccaggtgcagtgtaatcctagcactttgggaggctgaggtggacagaccacttgagctcaggagtttgagaccaacatggcgaaatactgtctctactaaagatacaaaaaatgaccgggtgcggtggctcacgccagtactttgggaggctgaggcggttgggatcacaaggtcaggagtttgagaccagcctggacagcatggtgaaaccccatctctactaaaaatacaaaaaactagccgggcatgctggtgggtgcctgtagtaccagctactccggaggctgaggcaggagaattgcttgaacctggcaggcggaggttgcagtgagccgagatcacaccactgcactccagcctgggcaacagagtgagattcgggaaaaaaaaaaaaaaagcaaaagcaaacaaacaaaactcaatagtaagaaaacaaacaggccaggcacggtggctcatgcctgtagtcccaacactttggaaggctgaggcaggtggatcacttgaggtcaggagttgaagaccagtgtggccaacatggtgaaaccccctctccactaaatatacaaaaatcagccagtgtggtggcacatgcctgtaatcccagctacacaggaggctgagggagttgaatcgcttgaacctgggcggcggaagttgcagtgagctgaaatcatgccactgcaccccagcctgggcaacagagcatgactctctcaaaaagaaagaaaagagaagaaaaaagaaaagagaagaaaaaagaaaacaacccaatattttaaagtgtgcaaaatatataaacagacatttcatcaaagatgctatatagatggcaactaagcacttggggaaaaaatgcttaacatcatcagacattaaggaaacgcaaggaaaaccactattagatatgtctacatacctattagaatggctaaaataaactttttaaaaaactaagctggggctgggcgtggtggctcacccctgtaatcccagcactttgggaggctgaggcgggtggatcacttgagctcaggagttggagaccagcctggccacccaacaaggtgaaaccccatctctactaaaaacataaaaattagctgggtgtggtggtgggtgcctgtcagcccagctactcaggaggctgaggcacgagaatcacttgaacccaggaggtagaggttgctgtgagccaagatcacgccattgcactccagcctgggcaacaagagcaaaattctgtctcaaaaacaaataaacaagaaaaggttttaaaaattgataaaccactagcaagaaagagagagaggacacatcaggcttgagagaagtgacatcatcatagactgtgcagacattaaaaggcataggcatattaggaactagatattactaaggcagtaaaccagatcactagcaaattcgttgaaaaacacaattcatcaactattggttgataatactgatacgcatcttctgtgtgccagggccttgaggccctgctccaggcagaaactcggcagtggttgggaaggcatcagatgtcagatggcacaagaggactcagagctgagggataatgggaaagaacacagaggaatccagccatttccacagcgtccagctctgctgtgggaggctgggaacagcccagcactaccaccctggactgggaggacaagaccacaaaatgcagcttccctgaacctcctcttggtgatggggttgatgtggtcgaggtagaggtgagtatgtctggagcctcaagcaactgcccatacctgctgggaccaggccgaggtgcccagggagtaagaggcagcatcctggaagagcacagatgaaagaggccctgagaagtgttggttggccaggtgctgtggctcacacctgtaatcccaacactttgggaggctgaggcgggaggatcacttgagcccaagagttcaagaccagcctgggcaacatagtgagactcatctctacaaaaaataaataatagaaagaaaaatgtgagttggccaggcatggtggctcatgcctgtagtcccagctactcaggaggctgaggtgggaggatcacttaaggccaggagttcaagacaagcttgggcaacacagtgagaccctgtctacaaaaaataataattagccagacgtggcgatgcatgcccaggctcccagctacttgggaggctgaggcaggaggatcgcttgagcctgggaggtcaaaactgcagtgagccggactgcaacactgcactccagcctgggtgacagtgtgagaccctgtctcaaaaaagaaaaaagaaaagaaaactgtgctcttaagagccagttctccactcctctacctcaggagccaccccagaacccatccactttgaggacacgagatcccagcccactcagccctgggagtccaaagacattttaaacagagcctctcttcacatttattaattcctgggaggaatgagggaggcttctccagccccccagagaccccggccttgtgctgcaacaggaggggagggagccagtccagaatccccggcacttctgaggacaccaacagcaccctgggcccgcggctgcatcagctttctagacaacgggagaaaagagaaatggtggaggaggggaaatcctatgccctcctcctcgcggaaatcaaggccgacctccctgacgcccccccggaaggaagcgcgtggtcggctgccagccgagacccccatctgcgcctccagctgcagggcctttgctgggcggttcctcgcccgcaattcccccacgagccctggggagacccagcgctaaccaggggtgcccaagggaggagccgggagaggccctcctggaggtgggcacagcccaggcaaacatcagcagacggaaccagcacccgggacccagggaaacgtcacctgccaccaggagctccacagggtcgctgagctccgattcgaaggtgtggggcacccaggagcggtagcggcacctgtagttgccggcgtgctggggccccacgaagatcagctcgaggttcgccgcggccccgggggtgcggaccgtcttcacggccttcgtctcgccctcgcgcagcagctcgaaggtgacgtcggggatgggtccctcgcagcgcaggacggcatctcggcccgccaggaccgccccactccacgtcgcccggagctgaggcctgggagggggtcctgggcggagcgggcgggtggtcgggccaggccacgccccaggccacgccccaggccacaccccaggccacaccccaggccgcgcccgcgcctgcgcctcagccccggcttcatcttccctgtcttgttcctgggcgcagagggctcctccggcgccgccgagctgcgcccgctgccttcacaccccggacatccgcgccacacgtgagtgtccccgcacccctcccccaggaccgtggaagtcccagattcgggcctgctctggggcttctggggtccccagcctcggtcactctgacgggtgaagggaagaagaaatgatggagaaaacggtgctccttcatggagggaccaaaaaaggacatacaatctatgtcaatagatgagggttttccctccataagtttaactttaaaagtgtatttaaggtgccgggcgcagtggctcacacctgtaatctcagcactttgagaggccgaggcaggcggattgcctgagctcaggagttccagaccagcctgggtaacacggtgaaaccccgtctctactaaaatacaaaaaattagccgggcgtggcagcgtgcgcctgtaatcccagctactcgggaggtggaggcaggaaaattgcttgaacctgggaggcagaggtttcagtgagccaagattgcgccactgcactccagcccgggtgacagagtgacactccgtctcaaaaacaaacaaacaaaacaaaactgtaaggaatcaaatgttacaaaatcctggaagattttggtaatgctgttgataatttcagggaaattaatgaagtacatgtaagtgcttgatttaaatgtgtattttattcaatagtttgagtatcttgccatggaagatactagcccagcctagcagaaaagtgcaatatgtataatatactttcgcattttaaaagttatattccctatccattttgaaatgctagccaaactacatgaagttatttgcaattaattgtaagctaatcaggaattttgaaagcttgattggattaacaaactataatgttgaaatttggtaaaatcataatgttaatttttactgtgaaacgttttcttgtaagatagatatacacatcctagtttaattttgtgtcttagtgtggatttacaaatttactacagttattctgagcccaggaacccaatcagatttcaggccagtttgatactggctgttcttaattctaacaggagagtaggacatcatactaaatgttatgtcagtgggactgtgttgtctttggagcttagtaaattaatcattttcttcagactttaaggagagtgataaataaaatttggagtcataggatatagatgtacaatttaaagattaaacattttttttttttttgagatggagttttgctcttgttgcccaggctggaatgcagtggcatgacctggactcactgcaaactccacctcccgggttaaagcaattctcctgcctcagcctcccaagtggctgggattacaggcatgtgccaccacagctggctaattttgtatttttagtagagacagggtttctccatgttggccaggctgctcttgaactcctgattttgtgatccacccgccttggcctcccaaagtgctgtgattacaggcgtgagccaccttgcctggccaagattaaacatttttcatcaattgtggatggtggcttataacactgcaagaataggctgggcatggtgactcacaagtgtaatcccagcactttgggaggcagaggcgggcagatcacaaggtcaggaggtcaagaccagcccagccaacatagcaaaacccggtctctactaaaaatacgaaaattaggtgggcatggtggcatgcgcctctaataccagctactcaggaggctgaggcaggagaactgcctgaacccagaaggcgaaagttgcagtgagctgagactgcaccactgcactccggcctgcaagaataaaagtaagttatccaaaaaaaaaacaaaaaggagaagaaaagggaggaatgaaggagagagatggggttggggggcagagatgagagagagagaaagaagaaaaaagaagaaagaaaagagagaaagaaggaaggaagaaagaaagaaggaaagagaaagaaagaaagaggaaggaaggcaggaaagaaaagaaagaaagtgaaagaaaagagaaaacggtgctcccagcaaagggtacgacctcaagatctggaggtcagacctgtgccctcacgctctgctgggctctgagtcctggagacgtcgatgaggaaatcagagggacaaacagagctggggacggcggggatggggagaaggacacatcagccgtgcgcctgcgggaccggggccggggcggggggtccagtatgacgactgacatggccagtaataaaacaaggcagccacagagctgcagggatctgaacaagaaaacctggggccagcctccctgctgccgaccaccacgctacacgtgacctacgggcttgcgtccgtgggaaataagccgaaattccaggcgtccccagaccctcgaccaccgatcgcctgctccccgccggggtaggcgatgggggctgaaccaaggcccagagcgccgccgtcggacgcccaaggaaagaggggaaagacaggaggccccgaggggcactgaacccgcgcccgccctcgctggtgccccgccagctcaccgtccacgtgcagctccaagcgctcgctgggcgcggagcccccgaaaggcggcttcaggtccacgtagacgcagctgtagttggcggagtcagccacggaaatgttgtgcagctcgaagagcgcctcggtcccagcggggctctggaaacggtgcacgcggcgcccgcccctgtcctcgcgcaccagggcgaagcgcgcgccctccaggggcgccaggcaccgcagccgcaaggccctgccggactccggctccggggagaactccggcgcgggcagcgtctctgcggagcagcacacgggctgacccgggcgcccagcggctggctcggccctaacgcgtggtctggcctcgcgctctttgccttggctgagtcttctgcccgcaatgacctggccagcttcctccctcgcctcctccgggcccgccccacctttgcatcccagtccttggatatctcacacgcaccctttcactgtttcttagtaatttgtttgtctacagacacagacgggaagcggggacggggacatgttttgtgcatggcttgatgcctggtgcacgatgccgctcagtagtggatttgctccacgagcgtcttctgagcaccgccccaatgcccgccccacggaggggcccctgtggtccgctgggcatggggttcgctgtccggtgctcagagtttgctaaataccatcaggtccaaggcaagcgagcggaggagctgcctcagcagaggccctcagtgctcacctagacctggcagctgggatgggacctgccaggtggtgccccctgtggcctgggccagacctgttcacccagttattccctgtggggcctgaaggttgtcacgctcatcatcatatttgcagtttaggaccctgaatcggcgggtgggcggataaagttggtattggaccctggcccagagcactgcacttccccagactctacacctggtactgctcctgctccccagggacccagccgcgtccctgtccctgctggccccggctcaccatcgctcagaatcagctcgaccggcgcgctgtccccggaccagccgttttggttgtcatgcagccggtagcggcaggtgtagtgacctccatcccccagggccaccgcgttcaggtgaaagaagatgcgatctgggctggtgctgctcctgggtaccagcagctctttctccccgcgccgtagctggaagtccactccactcaggggagccacgcaggtgagggtcaccttgttgccagggtgcaggacctgggaggactctccatggtgcatcagcacaggcggtggtggtgcagctgcaatgcaggcagcattactaggctgccccatccctggagctgccctctgcccagtccccagacctctgccctccgggtggcaatcccaggaacacccttccattcttttttttttttttttttgaaacggagtttcgctcttgttgcccaggctggagtgcagtggcgccactcagctcactgcaagctctgcctcccaggttcaagggattctcctgcctcagcctcctgagtagctggtactacaggcacctgccaccacacctggctaatttttgtatttttagtagagacggggtttcgtcatgttgggtagactggtctcgatctcttgacctcatgatccgctggcctcagcctcccaaagtgctgggattataggcgtgagccaccgcacccggcctcacccttccattctttgggcatcctctgcccaaactcctttgcaaccatcagacccaggcaaccgtgtggccagcttcctggacctggtcctgggcaaggacattcagcatggaggtcaggatgaatgtggtcatgccccctgtatcctcctcccccagcagcccccagagatggttcccacagtcaccgagctcctcaatggtcacagtagcgctgggctcagagagggcgccttccccatcggtccggtagctgcagctgtagttgccaggctgatggactggaaaggtggcctccacatcctcctgggcctcaggcacctccagaaactcatggtcgccctcccgcctcagcagaaaagtcacaccccgcagcacacctcggcacactgctgttgttttcaggccgggggtgatccaggacactggcgccatcgagagccagggagcaggcaaggactctgtgggtggggtggagttgaagagtgcttctgcataacaggagacgtgggaagcccagcagaacctgggccccacactcataagactgtgaaggagacagggatggagggcattgctgggaaaaggcaggcaggcaccagtggaaacaaggcatacggcaagagaaaaagagtgtgtgggagctgtacggcatgccgggcctgctggggacacaaccatgtattccttacaacacagacatcatccccatttgacagatgggaagattggggcttggggctcagagacatcgggtgacttggaggaagggagaccccccagtcaacaacctacccactgcctcctggcccccaattcatgccccggctcacttggccctgtcagctccaggagcttgctcagctgggtccatcctgtggacaagcccgagcggcagcggtagcggccctgggtgtcacccgtcagcaggaactggtgcttgatggcaggtgagtcaaggtgcacaggctcctgggccaccccattcttgaacagctggaagtctggagtctccaggtgggcctggcacgtcagcgtcacattggccaagggtttcagcagtgattcggactctgcccacaggctgggctgcgtctcataaactgcaaggggtggctgggatcagctcagtgccacagagacagggctcccccccggcctgggcccaccattcccagacctcacccctgcactcacatatggctgcttctgtcactgggccccaggtgacacctgcggagacagcccccgtaaggctcctgttcccgccccctcccgccccagggacccagaccccaggaggcctcaccccacagcaagagaaagaccacgagcatggacatgatggtcgcgctcactccggtgcagtgagtgtctggggtgagcgtctgcagcaatgaggccccaagggagggcggtggggtggctcgggcactgacctcttcccgtgtttgtccttcccggaaggcgggggcagggcccccatggggtcagggcaaagggtgaacttctgaggcctcaggatgcccagcaacaattataatcaataatcatgtatgattaataaactaaatcaagagtgataaaatgatgttaaaaccacctcatcctcatttcagtgatggatcctagaacctgttctagaaggagacgctgagttctccccactctacctggagctgctgaggtcaagtggagagtgccggggctgaagcccagcgagcccctccctgtcacaccacactgcacatgtgacaccaaaggtggggttcacctcttttcagactttctgcggttgccctcacatgggctgtctggaggtgcaccctcactcttcctgaggactgtggttccttctccatcactggttcattctgcatggtgtgacccaccacggctctggagtcggatttccacccaggtcattcagctgagacctgcgcttcccaggcctacccgtgacatgtgctcagttacctgagctgctggtggtcactcatgtggctatagcctgctgcctggaggccaggcctcccgcttcccctgcctccccctctcctcaccacagcctgttgggatggaacaggacaggggtgagaccgtggtgctttcacactcagcctccatggacatcctgtcattcccacccggggaggtctggtccccaccctgggtgtcccagcctagctccgctacgagtgtgagggcccagggcaaccgcctagccctcatctgccccctgcactgcatcctccccactcattcattccacaggcatttattgagcatctactgtgtgccagatgcaaagaagacagtgggataactgggcaaggagcattccaggcagagggaacagccagtgcaaacatgggagatgcgggtgcagtgagaaggagcagaggagaccaggagttgaggcgactgcagagcgattgcagagctcatagacgtgatgaagaccagctgggcactgcagcggctctggcttctgctgtgagggacggggagctgtggagactccctctgtttggtcccatttccatattgctgagcacctgctgcatgctctctgtcctgctcagagccagtacctggatggaggctgtgtgttctgggtggactgggggagaatgcattctttgcagaagagacaaccaggtgctgaggcctgaagtcataaccagacctggggcactcagacaaggactggtggccaggccagaggagcagagctcagggtgtgcacagaactcagaagtcagaccactgaacagtgacagaacctttcagcccattggcaatgaggctgcccaggcagccagaggcctggtcaaatctgaggtctgcagagatggagctgtcattctgtgtttcctttggcagtcccaacaccagcctcgttgcaccctcctcttagcttccctgggttctccagccctaagggtggtagcagcttcctgcaagtatccagctctgagattctgcaacatccacttttgctctctgagccttgcaaaacctgcacaatcagtccctaacttatatcccctctgtttgaaatacctagtgtggtttctatttcctgacttgactctgactggtgtggtacttggtataaagaaggttccctggccaggtgcggtggctcacgcctataatcccaacgctttgggaggctgaggcaggaggatcacttgagcccaggagttttgagacccgcctaggcaacatggtgagacactgtccttacaaaaaattttaaaattagccaggtgtagtgacgcaagtctgtcatcccagctgcttgggaggctgaggtgggaggatcacctgagcctaagaagtcgcggctgcaataaacagtgattgcaccactgcactccagcctgggtgacagagtgaaaccctgccccctcccccaaaaaagaaaagtcccatgaaacagacctacacaggtgagattctgagattgatctggttctgacctcggtcaggaatgcagtgctgagcttcttgccaacagaatatgagacactagaaagccatagcatgcggtttcatcatgtttaactgtcacctgtggttgcctgagatgaagtgctgactgaagcgagcaccttaggagacacagtggccactgcactgagcagctggtagcagcagtggtgaccatgtggactggggggtgggttggctgcttttgacagtgccagagaactcaaagaaatagccacacctgtcggagaccccagttcttgcccacctctgcatggacgaacctctcgccgaagtggagcctgccgccctccctggggtaagagcccatcctacatgtccccagacaggcctgggtggccggtggactatcgtcaaagggactgtgcagccagggttctccacacccaaggccgcccctgcactcccagcaggagggcgcccgcaccggcggcccgaaaaagtctgggccagcagacagcgcactcacgcccgagaccccgcaatgccgtgtgtccgcgacctcccgctcagggcgtcctcgggtcagggcgcagcgcggcccccgtgccgcttctggtgctcgttgaggttgcaacggtggctgaaaggcttcccgcactcgccgcaagcgtagggcctctcgcccgtgtgcgtgcgccggtggcttaagagctccgacttgcgcacgaaggccttgctgcagtgggcgcagacgaacggcctctcgccagagtgcaggcgctggtgctggcgcagctcggagctgccgcggaaggccttgccgcattctgcgcaggcgaagggtcgctctcccgtgtgcgaaagccggtggtgcgccaggccggaactgccgcggaaggccttgccgcagtcggcgcaggcgaagggcttggcgcccgagtgcgtgcgccggtggctcagtaggttggagcgctggctgaaggccttgccgcactgggcgcacgcatgaggcttctcgcccgtgtgcacgcgccggtgctccgccaggtaggagcccatgacgaaagcctggccgcactcggcgcactcgaagggccgctcaccagtgtgcgtgcgctggtgctgcaggagctgcgagctctcgcggaaagcctttccgcactcggcgcaggggaagggcttctcgctgctgtgcgtgcgccggtgctgccgcagccccgccacacgcacgaaggccttgccgcagtcgggacaggcgtgtggccgtgcgcccgcgtggatcttcaggtgctcggccaggttggagctctggctgaaggccttgccacagtcccggcaggcgtgcggccgcgcgcccgtgtgcacgcgccggtgctccaggaaattggagttccagctgaaggccttgccgcactccgggcactcgtagggcttctcgcccgtgtgcgtgcgtcggtgctgcaccagcgtggtgcttcggccgaaggacttgccgcagtccgggcagcggaagggcttcaggccgctgtgtgtctcctggtggtggatgagctgcgagtgcgcgcggaaggccttgccgcactccctgcaagcgtagggcttctcgccgctgtggatgcgctggtgctggctgaggttggagctccaggcgaaggccttgccgcactcggggcacgtgtacggcttctcgcctgtgtgcacgcgccgatgctgcagcaagtaagagccctggctgaacgccttgccgcactccccgcaccggcagcccggctcctctgggagaggcgaagggcgcaacgcccggtctgcaggctcgctcctgggcccagccccgtcccgcccaccgtctgcggggcccagctccctgccggggcctccctgttcgtccgccgcccccagtgtggcttgctgccgctggccgtcccctgcctccctcggaacctccgtggagttttcccaggccccccagcctccagacacagccccctcagagaggcccctcgtggcagtcttcacattgcagaggacctggccttcctctggggccacctgcagggtccaccctcttggggactccatctcgcgcctgtgacctaaaacaggagagaaaaggcaagtaccttagagaatacaaagaacaccagacagagggcctgagggggacacgacggtgggtgggctgtcatcccccactcttctcctccaggtccctggatgcccaatgccctctggagcctggagcaggaaggccagcaggcgggctagacactcgggggatgggccagcactctgggcctgcctgacagggccacgtgcacatccccacacccggcccggcccagcaggaggggagggggcgccagcatcgcagaaggactcaaagttgcccacgcacctgcactggccctactgtggcaccactctcctctccttgcttcacagggtggggccccaagtgtcaagaaggtggagactccagtttgtgaggaacacgatggacccgtctccattcctgaaggctggaggacaccgcctgacccaaacacagctatgtctgcctcacccactccaccctggccggatccctgggtagtcccctccacacagtatgggcagcatgtccaggctggaggatctcagtggctgttacccaggcaatgtccacaccaggcctctgtgcaggtcagaccaggtggtccaaggcatggggtggctgtgcagcccagatccctgagagagagagaggccaagggtgggagggcctccttggtcctaaggccatgcctgcctgtccagccgatccttcccacagcgaagtctctacagcgagcaaaacccatcctcatttgccctgagcaccttatcatccttgtgtagtctccagccccgctgccaaggcagggcagggacaagtgtgtagatggtgccatacctggaggtggggcctggaaggggcccaggggagcctcttgctcctctccctcctctgtcctggggaccagctcctcttggggcctgggggctggcacctggggacaggaaggcagcagggcagggtgaggtgttcagcctagcagatctgagaaaacaaggggcatgcggtggcatgacccacccttctctgcaccttcagttctcaggacacaatgcggagcacacaggtgtggactggagatctctgactctgccgtccaagccaagaccaccaaactcccacctgtcaccatcactttcccacagcccccaggccctctcagccaccaacccacgactggccccagtgctggctcagctggggtcgtgagcaggggaagcacacccagcccccagaccagcccccactcatctggagtcctggcccagctgactcctgctgtagccgctctgccagggcagtggcctcctcagggctgcctagccactgctcctgcgtgtaggcctggatctctgggagcagtgtgcccaataactgctccagcaccaagagctccagcatctgctccttggagcaggcctcaggcatcagccactggcaacacagctcacgcagctgagccagggcccctcggggccctgctgccttctcatagcagaacccccagaagcactggccagggctcttggagctgggctcacccaccatcagttccagtggactcgggaagacctggggggccagggctgatgcctcactcatctgggcagccatcctgcccctttcctgggaggggagtgcagctgcatggcccagggtactttctctgcagctggaaacacaaaggtgagcctgtgagcacagcaaggccacgaaggtcccctccttgggaccacctgagactgagtaaaaatggaagaatgggggtatcggcgtttctggcccccagtgtcagcatctttgcccacctgtgtgtccaggtgcctgagggacacactgaggtgccatggctgcttgtaccatcccttccccccgcctccccgcttttcttgagggtccctgccctgccctgtctccttggcacccttcatcccacacacagaacaactaagacagagactgtgaacaggacacccagagtcagaccagcagatgggtcctgtttgtcccctccaggaagtgttttaaaaatttaagttaggccaagtgcggtggctgacggctgtagtcctagcactttgggaggccgaggtgggtggatcacgaggtcagcaattccaagaccagcctggccaacatggtgaaaccccgtctctactaaaaatacaaaaattagccaggcgtggtggcaggcgcctgtaatcccagctactcgggaggctgaggcagagaactgcttgaacccgggaggtggaggttgcagtgagccgagatcgcgccactgcactccagcctgggtgacaaagtgagactctgtctcaaaaaaaaaaaaaagagaataaatactgatacatactacaagatggatgaatcttgaaaatattatgctaagtgtaaatgaaaaaattcagacacaaaagacttcatattatgttattccatttatgtgaaatgtccagaacagataagtctgtaagagacagaaagtagatcagcggttgccaggatctgcagggaagagagaaatgggagatacagccgtgggagtgatgaaaatattctggaattagtggtgatgactgtgcaacactgaatataccaaaaaccactgaattacacactttaaaaggatgaattgtatggtatttatgttttttaaaaaagttaccacccaatcccaaaagcttaaaaactgtatgactccatttctttttctttttctttttttttttcttttgacagggtctggctctgtcatccaggctagggtgcagtggtgcaatctcatctcccaggctcaagccatcttcccacctcagcctccgaaggagctgggacatcaagtgcgtgccaccatacccagctaatttttttattttttatttttctatttttgagacggagtttcgctctttcacccaggctggaatgaagtggcgcaatctcggctcactgcaacctctgcccccaggattcaagcgattctcctgcctcagcctccccagtagctgggattacagatgcctgccatcaggcctggcttattttattttattttattttattttttagtagagatggggtttcaccatgttggccaggctggtcccgaactctttttttttttttttttttttttttttttttttgagaagagtcttgctctgtcgcccaggctggagtccagtggcgctatcctggctcactgcaagctctgcctcccgggttcataccattctcctgcctcagcctcccaagtagctgggactacaggcgcctgccaccatgcccggctaatttttttatatttttggtagagccggggtttcaccgtgttagccaggatggtctcgatctcctgacctcgtgatccgcccgcctcagcctcccaaagtgctgggattacaggcgtgagccacggcacccggccggtgggccggtcctgaactcttgacctcagatggtccacccgcctcggcctcccaaagtgctagtattacaggcgcgagacacctcgcccagcctatgcaacattcgtaaaatgacaaaatggtagaaatgagaacagattactagttgacaaaaagaggttaacggggagcagaggtaggagggaagggtatgcggctctgtaagggcaacacggggatccttcgtgatggaaatattctgcatctcagttgtgatattgtactctagtttttctttctcttctctttttttgagacagagtctcgctctgttgcccaggttggagtgcagtggcgtgatgtgggctcaccgcgacctccgcctcctgggtacaagcgattctcctgcctgagactcccgagtagctgggattacaggcaccagcctccacacccgcctaatttttgtgttttcagtacagatggggtttcaccatgttgctcaggctggtctttaactcctgagctcaagggatccacccgccttggcctcccaaagtgctgggattacagacatgagccaccgcacctggcctctagtttttcaagatgccacctttaggggaattgggtaaagcgtacatagggtatgcattacttgttactgcatgtgaatttataattacctcaaatcaaaagttaaattttaaaaaaacgacatctgatttcaataaaaatccatatttgtgtattgaagtatcagaaatccgggtcccccaagggcccatgtttcttaaggcggagccaggcaccgctgcccctccatcctgtggtgtgcgaccccgacccgccagcccccagccgcatctatcagggctgccgtcctgagtccgtcctcgtcgtgggatagcatgtgagccccgtaaggtccttcctgtcggcctcactgctccagcctccccgacgtcctcacgtccacgctgcgtgccctttctgagcctcaacgcctcctcctcacctcgacatgatcagagccacctcccgcgtcagtcccagcgcccacgcccccaacaacgggcacttgtccgaccagtcacgggtacttgtgtctcccccacaacccccaaggcctaggctggacaaacaaatacggagtggataaaggggaggaagctgcggccaggtggcgcgaggcctgtgcgggcagctccggaggctgggaggcgagcccagcctggtgagctccgaaactacccggggctggggactgatgaacgaataaatgaatgtgggaagaaatgatggcgcggcagggcatgagtgaatgagtgaaagaataaacgagcaggaggaacgatgccacagaactgatcgccataaggctcgcgttcaccgagagaacagcaaacgggagccatttccgtcccgaccacggtcgcctctggcccgtgcagggccacttccgggccgctctggacggcgcggaggcctatctctcggtggtcccagagggcccagctcagggccgaggcccgtcctgccccgcgcggcgggagtggttggagccggagggcggatctgtgcctggccgagggtgtccgtcggcgtcactcaccgtcctcggcccgcctctgcgtccactaggagcggcctgaaagaggcccgcacgcgggctcgagccgcgtggaatggtaggagggcgggcaccgggtctcctgggggcgcggttgcattcggcagagcggcccaaggcgtcgcgtttctccccactgcgcctgcgtaactatgccgcggctgcgggcgcgcgccttctggttcccatggggacggcgccacagccaagctactcgggcgtcctgcgttgccatggatgcgctccgccccttcctgcacccggccagcctctgcggcacacacccaacagctacacaggcgcctggggctgcccgggtcgcggacgcaagtcgggccaacgtagcttctccctggcggtcctcctccggccccaggccgtctttaccaccctggaaccttgctgagttgacgccactgagctgcgtctcacacccacgcgctgtggaacacccaccaagctggaatccacgcggtttttaaaatagagtcgggggccgggcgcggtgactcacgcctgtaatcccagcactttgggaggtcgaggcgggcggatcacgaggtcaggagatcgagaccatcctggctaacacggagaaaccccgtctctactaaaaatacaaaaaattagccgggcgtggtggcgggcgcctgtagtcccagctactcgggaggctgaggcaggagaatcgcttgaacctgggaggcggagcttgcagtgagccgagatcgcgacactgcactccagcctggggcgacagaacgagactccgtctcaaaaaaaaaaaaaaaaaattgagtcgggatctcagaagctaagcagggtcgggcctggttagtacttgggagaccgtctgggaacaccgagtgctgttggctaaaataaataaataaaccgggcgcggtggctcacgcctgtaatcccagaactttgggaggccgaggcgggcagatcacgaggtcaggagttcgagaccagcctgaccaacatggtgaaaccccgtctctactgaaaatacaaaaattaggcttgttggcgtgtgcctataatcccagctactcgggaggctgaggcaggagaatcgcttgaaccggggaggcagaagttacagtgagctgaggtcgtgccactgcacactccagcctgggtgacagagcaagactccgtctcaaaaaacaacatagaccagatgctgtaagctaaaataaatgaatagctagagacggggtctcgctatatggcccaggctggtcttgaacttctgggctcaagtgatcctcccaccttggcctcccaaagtgctaggattacagacccgagccactgcacccggcctccacgagctctttttgtaccaatttttcccaatttgtactagggagctctcacctcagcccaggtggtttgggcaggtgtgggtacatggcccaggtccacagcacagggcagtccatccctctggccctggcagtggtcactttggacctgtgagcatcgtgggacttctctctgaactgttagggcctctatctgctttgaacctgaggctgtgagcatctgtcagctggggcagctgcagccttcttgccccgctgaaggatgaatctgttaagagaatggagtccatacagaaaagcagaactgagggatggtgtgttagtttcctgtggttatgcagcaaattaccacaaatttggtggcttaaaacagcagaaatatattcccgcccagttctggggaccagaagtctaacatcgatatgactgagctgaaacaagatgttgacagggctgagctccctctggaagctctaacgtagaacctttccttgcctttttcagcacctagagctgcattccatgtattccttggcttttcgtcctttcctccatcatcaagtaactggtaacatcttactatttctctcattaagttaaaatatttaacatatgttcattttatcttatttgcatgagagtcaattttagctttaaaaaaatttttattggccgggtggggtggctcaggcctgtaatcccagcaatttgggaggtggaggtgggcggatcacctgaggtcaggagttcgagaccagcctgaccaacatggtgaaaccccgtctttactaaaaatacaaaaattagccgtgtgtggtacatacctgtaatcccagctacttgggagactgaggcaggagaatcgcatgaacctgggaggcagaggttgcagtgagctgagatcatgccactgcactccaacctgggcaacagagcgagactccgtctcaagaaaaaaaaaagggggggaggcctgggcgcagtggctcacgcctgtaatcccaacacttgggaggctgaggcggggggatcacgaggtcaagagatcgagaccatcctagccaacatggtgaaaccctgtctctaccaaaaatacaaaaattagccaggcgtggtggtgtgcgcctgtagtcttggatcacccatgctggaagaattcagctgcccggacatgaggaaactcaggtctgcagtcctgtggagaggcagtggagcagtgcatactccaagcccagtggggccttcagatgattgcagtcttggctgccatgttgacttcaacctcgtgagaggccttgagccagaaccacaggccaagctggtcacgaattccccacccccagaaaatgtttgcgatgataaatgtttatttatttatttatttatttttgagaaagtcttgctctctcacctaggctggagtgcagcggcgcgatctcagctcattgcaacctctgcctcccaggttcaagggattcttgtgcctcagcctcccaagtagctgggattacaggcacatgccaccatgcccggctaatttttgtatttttagtagaaacggggttttgccatgttgcccaggctgttctggaactcctgagctcaagccatccgcccaactcagcctcccaaagcactgggattacaggcctgagccaccacgcttggcctggagcatgcccttgatgtgcaaactaaccaatccagagcctcacccctctacctggtccacacaccgcaggagacagtattcctctgtcttaatcatccccggaacaggagccaagcagctggggaacactcccacagctgaaagcccacaggaattactccagctagccagtcctgtgctgtaggctctgctctgccttgcttttcccttggaaaccccagtaaaggctctggcttagagctcccccttggtcctgcccctgctgcctctgacagatgctggtgcttttctcatgtgtccttccttgtgggccgtgcctcctgtttccaggatctgtgagcatgatgaactttgttttcctgagcttgtcctgtgtctcctcttctggccacacctgactgagcagaacataaaagcgacagaacaccaggagggctgctgcttggggaaattgtgtgagaagagtcctgggggactaggggcagggcaagcactgctctccctctcctggaggctggggagagcatcaaggagactaccaggtaggaggaaccatgggcagggcctccctcatcaggatgctttccccacaacagagggatttaagcccctggtgggtgagtcctggattaaccaagacctgagccttttggggggtgcagaggacagaggacactgtgaggtgagtttctcctgggtggattccccaggggcctctgaggctggtttcaggccctgccctttggctgccccactggaagctctgagcatctacccttcagggacgctttccctggtctgaccttggcaagggcaaataagaggtactccatggagggtcaccaaggtctggggcgtaaacggtgcccatctgcacagtagcatgagggccacagagtgtggtaaatgtcagtgaccatcacatgcggtccccagtgtggctgcaggggccacttaggattcttctgttcggggtcccaggccacacttggggaaccctattggaagcaacaaggtctaggccctgagggcccagggctctgccctctccagggctctagctgagccacgtgcaagcatcctcccggccctcccagctggtgtgaggaggaaaccacagccaaagggcaaggtgctccacacagatatgtccctagtcagcctgccccattcggcctctggagtgggagccttgggtctgtctggaaccagtgtggatgaaatgcagggagaaactggaatcatagccatggacagccactcacatagctgggaagaggcatgctgtggtagatcccggtggactctcacctctgcggtgctggggacgttgtgccgacacctcaggcacccacttccactcacaccgcggaggcttggggagatgcggttcagtctggagtccagcggggggcgacaataaaggcgaccccgctcgtcagtcagaccagggcaagcttgccagggcttcacacttcaccaaagggaaccctttctgccgcgactaccgagctgccagggccgggacaggcagaagcctgccccgaggtctcacctctggagggttacgagctgtgccaggccggctacggtagagggtgtgcaaataccccgcggtcccaaggctcctgaagctgcctaagggatatgagagaccctaggttcgaatcctgcctccatcgtcttatgttcgtgcctcaggagagtcactttgccccgtttcctcgcataccagagagcccagtaacacgctccgcggctctgcggagaaaaagaccctagagatcgtggacacagcgtctgggccgtatcagcgcccactcgagattattactgcttatgcctgcaaccggatgctgtgcgcccggttagaaaaggtcaaataaaactcgagttaggggaagcctgtggacgccatgtgtacaaagtgaagtttaatcaaagttacaaacgttggtgggttttccgggacaaaggcccctcctcgacgcagggttcgcttgggcgacgcgtcgactctcggctccctgcagtcaaggcgcggcgcggcccccgtgccgcttccggtgctcgttgaggttggagcgttggctgaaggcgcggccgcaatctccgcacgcgtagggccgctcgcccgtgtgcgtgcgcaggtggcgcaccaggctgcagttgcgcacgaaggccttgccgcagtcgcggcagatgtagggcttctcgcccgagtgcaggcgctcgtgctggcgcagctcggagcagccgcggaaggtctttccgcactcggagcagccatagggccgctcgccggtgtgcgcgcgctggtgttgcaccaggcccgagcggcccttgaaggccttttcgcacagtgggcacgcgtagggcttggcgctgctgtgagtgcgctggtgccggctcaggttcgagcgctggttgaaggccttgccgcactcggggcacgcgtagggcttctcgccggtgtgcacgcgccggtgctccacgaggtgcgagaacagcccgaaggccttggcgcagtcggcgcactcgtacggcttctccccggctcccgacccccgtcggggactccgctcgctgtagtccccgcagggcgggcaccccagccggaaggcgcgccgcgccaggacggggccacgccggtggcgctcggccgagtgcgtcttctggtggcggtacaggccggagcagcgcacgaaggccttgccgcactcggcgcactcgtagggccgctcgcccgtgtggatgcgctggtgctgcagcaggctggaggtgcgcgtgaaggccttgccgcactcgtcgcaagcgtacagtcgctgggccggggggtcggggacaatagggcgaggtcgcgaggtttggccgcactcaggacacactgggggactcttgcccgcctgctgctgctggttggggcggaagcgcttcccgcaccgggcacacggacggggctcctccgtcgcctgcagcctctcctgggggatccgcagggccctccacgcaaaggcctcgccgcacgcgcaagcccggggctgctccaccaaggggttcctcccgcgggaggtcggctttggggtcctcgggcaggtcggagcgccagtccctggttggcacggccaacagtccgtgtggacctcacacagttgagtccgggggtggttctggatccgctccggacaggggtcacacacgggtggcgtctccccagcgggcgccccgcgatgccacgccaggcaggagttcctgctgcagtccccgccacgcgctgggctcctacaggggccctcccgggcttgcagcccctcggggataaccagctcagggttctgagaagaggtggggccgcacggctcccgcacgaggggtctggtcccggcgctgtgccgggtccccgggccggggctcaccccgaggctgcagccccgggagcccccgcctgggggagtcgtcctaccgcccgccgctccacgcaggtcccccttttgagtggggcggctcccagctcggtcctcttcgaggggcctcggctcctcgggcctcttctcccgggccccggaggcaccctgggcatcggccttggggagtcctccctgcccagccttctgggctggagcctccatcctggggcgcagagttctggttgtaggatctggaagagcagagaagaaatggaggttggcggttcccaggaggagagaagtggagaactgggccaacgagcgaccaccccacagctggcacctactgggcggcccccagctctctgcagatgcgaaagggtaaatggagtgacataggcagcccgtcctgcccctcttcaaattgtcaccacccagaccccagagaacagcttcccaggctctgcctgcccgccatcaccgttcctccccaacactagctcctaaaacactgtgcccctggctaaggccctccctggtcccccttccccaagcaacagggactcccccgttgctcagctgccagctccccaaaatctcacttactcctgccctccgtttctcagtggcaagccgacactccgggtcctcctggctccattcactgccattgtccatgtcttctgagaggtgtgaggtgagactcacctgacagctgagagcctggccgggagatccacgctgcagaggccaatgctggacttcccctcccctcttcaaccaggtaacggtggtgctctcaaggctggcagcctcatctacaaaatgggtatgataacggtaagtataaccagctgagtagggagacaggcagcccagatcattcaagcaagtgtgaacattagcaacgcctggcgcctgctattactattttaaaattacactgtggctgtattagttatctattgttaaagctgctttaacaaactgccaccccatagtggcttgagacagtgcaaacttgttatctcagagttctggaggtcgtaagtcctaagtgaaggtttcagtagtgtgggttccttccagaagctcttggggaggacgtttgctgaccatttccagcttctaggtgccacctacttttctttcttccatcttcaagccagcagtaagacatgttcatctctctctttctgggtttgttgtcaaatctccttatactccttataggattctgacccttctgcctcttgtgatcacactaggccaaccacacataatccaggaatctccccatctcaagatccaaaacttcatcacactcagttcttttgccttgtgaagtaacatagtcagaggttctaggaaacaggacgtgcagatctttcagggggccattattctgcttacaacagtggactttgctgagatacacacacgtgcatatataaatattcatctcctaagcaagcaattgaatagcaagtgaaaacaaaggacggccgggcacggtagctcacgcctgtaatcccagcactttgggaggccgaggcagatggatcacctgaggtcaggagtttgagaccagcctgaccaacatagagaaaccccgtctctactaaaaatacaaaattagccaggcatggtggtgcgtgcctgtaatcccagctactcaggaggctaaagcaagagaatcacttgaacccgggagatggaggttgcagttagccgagatcgcaccattgcactccagcctgggcaacaaaagtgaaactctttcaaaaaaagaaaaggaaaaaaagaaaagagagagagagggagggaggggtgaaggccggggggggggagccgggcgcggtggctcacgcctgtaatcccagcactttgggaggcctaggtgggcagatcacgaggtcaggagatcgataccatcctggctaacacggtgaaaccccgtctctactaaaaatacaaaaaattagctgggcgtggtggcgggcgcctgtagtcccagctactcgggaggctgcggcaggagactggtgtgaacccgggaggcggagcttgcagtgagccgagatcacgccactgcactccagcctgggcgacagaacgagactctgtctcaaaaaaaaaaaaaaaaaaattgccgggcatggtgatgcatgcctgtagtcccagctactcaggaggctaaggcaggagaatcacttgaacctgtgaggtggaggatgcagtaagctgggattgggccactgccctccagcctgggcgacagagcgagactccgtctcaaaaataaataaataaataaatattttcctcattgtgatgtgatgtgaggtttctcagcctcacacgtgataagtgcacaatcctcctgtcccctccctagatctcattgtttccagaacaaagatggatctgtccagcacagcctttagactctgaatcccggatggctaacatcatatgcagagcgtgagatggacacacttgtggcaccctcgtaaatcactgcttcactcggcacaggagctcagattcttctccttttgtcctgtgttccctattctgtgcaaggcagatatcctcttattttattttatttattttggtgttttttgagacagaggctctctctgtcacccaggctgcagtgcagtggcgccatctcagctcactgcaacctccgcctgctgggttcaagcaattctcctgcctcagcctcctgagtagctgggattacaggtgcctgccaccatgtctggctaattttttgtatttttagtagagatggggtttcaccatgctggccaggctggtcttgaactcctgaccttgtgatctgcccacctcggcctcccaaagcgctgggattacaggcgtgagccaccgtacctggccagatatccctttatttatttgtttgtttgtttgtttatttttatttatttagagacagggtttcactcttgttgcccaggctggaatgaagtggcacaatctcagctcaccgcaacctccgcctcctgggttcaagcaattctcctgcctaagcctcctgagtagctgggattataggcattcaccaccaagcccggctaattttgtatttttttcttagtagagccggggtttcaccatgttcacggggctggtcttgaactcctgacttcaggtgatccacccgtctcggcctccccaagtgctgggattataggcgtgagtcaccgcacccagccgatatccatttattaaatgtctcagagggccgggtgtggtggctcatgcctgtaatcccaacacttggggagtccggggggggcggatcacgaggtcaagagatcgagaccatccttgccaacatggtgagacgtccttgacctgatgtcactttttctgtctgttttgcagatttctaacaggcagttgccctgggccacctggtggcctgaaataacttgaccgggaactaaaaggactcacgaagcatttaaccaagactctacatgttgacttttcagccaaggacacttcagagcgactggctgcagttctccaaaggaagctgctgccagttgcccctggggggttatttccttcttggacatcatgaccacaatggcagaaatgcattgatggccagcactctggggatgaatgtttttgagtggaaatgaaacataccaaactggttaaagacaaaaatgcagagttggacaagttctgcaggtcacgaaaggcctttgaagcagccaggcccggttcctgctctgctgtatgggaggctgctggcctgagctggagagcagaaaggcccagtgccaagggttcagcaagtaccagtcccaggccaggcatttgctaataagccagggtgacagtaaggacaaggggactctggtgtgatgtgaggtttctcagcctcacttgtcacacgtgataactgcacaaccctcctgtcccctccaggcctgtgtgagacaggaaaggtgaggctgcctctccctctgcaccttaaagccactcggggtctgggttttcctgagacttcccggagccagatgcagactcccaaaggcgccgatccttcctcgatctccctccctcaagagtggcactaatcaggtctaatttagagaaaatccatcacctccccccactgtgggctctgccacttcatgccttggtctctccacctatcagccagctggagcctgggactcaaggaggcatgcttggaagtaaggaacttctctgagtacgaggacatctgggtggtgctgaacaccagcatgctttgccccgtggcctggactgtgcacagggcacctagagtgacctgtcacctcccacgcaggtggaagggtgtgagagagaatgggcactcagttacaaacatccccttcccaaacacttgtggatctgagtctgaggctactccttccaggtgaggggttggctgctgttgtagcttgttactctctttctgtcccttctgccctcaggtcttgaccatgcagcttcccaagaacaggatggggaatgatatgggcacatggggaggcaagcagccacaggcctcacctgctcatgggcactgaccgtcccaacagcaggtggacatgaatctaacccacagacaccagagtagagggagctgggctccctgagtctggatggggttctcacaggcccccacagggagacaagggaagctttctccagaatgtggagtacggactcactgtgtgaataaagtaaatgagctggagggggcgggacaagatttcaaaaagcaccactcatacacccaggactggcaaagctgctggcagtaagctctatcatggggctcccccactgcaggtgagctgattggcctcagctggcaccatccatgctcagtgtttgccctgaggacaagaagacatggcaaaaaagaggaaagtacagaacacactcccacctggctggtggggatatagatagtgcagctgctgtggaaaccttcagctccacagaaaggtaaagatggagctaccacaccccgagtaattccacccctaggtatccacccaagagaaatgaactcaggcattcaagcaaacactggctcacagatgttcagagcagcgctgttcacagtagccaaaatggagaaacaagccaagtatataaaatgacaaatgcataaataagatgtggtatatccatagaatgggatattattcagccataaaaatggatgagtactaacacatactgcaacatggactttagaaaacatggaaagtaaaagcagtgagtcacaaaagaccacatattgcataattccatttatacgatatatccagaataggcaaatccacagagacagaaagtagactggtggtcgccaggggctgaggggaaagagtggggagtaattgctttacgggtatcaagttttggggtaattaaaatgttctggaaattatagtggtgatggttgcacaacatagtgaatatattaaaacctaaaaaatatactaaaacctggccaggcggtggttcacacttgtaatccccgcactttgggaggcgaaggtgggaagattacttgaggccagttcgagaccagcctggccaaaatgtcgaaaccccatctctgctaaaaatacaaaaattagccgggtgtggtggcacattcctgtagtcccagctacttgggagactgaggcagagaatcactggaacctgggaggtggaggctgcagtgagccgagatcgcaccactgcactccagcctgggcgactgagcaagactccatctcaaaaaaaaaaaattatatatatatatacacacacacaaaaacatggccgggcacagtggctcacgcctgtaatcccaacactttaggaggctgaggcaggtggatcacttgaggtcaggagttcgagaccaccctggccaacatggtgaaaccctgtctatactaaaaatatgaaaattagccaggtgtggtggcaggcgcctgtagtcccagctacttgagaggctgaggcagaattgcttgaacctgggaggaggaggttgcaatgagccgagatcacaacactgtactccagcctgggcaacagagcgagaatctgtctcaaaaaaaaaaaaaagtatatatatatatatatatatatatatatatatatatatataaaattacatatatacttaagagtatatatttatatagaatgtaaatatatattagagatatatatatactaaaacccaacctgaattgtaaaatggttcatttgttacatgatttatatatttttgttttgttttgttttgttttgtttttttgagacggagtctccctctgtcacccaagctggagtgcagtggtgtgatctcagctcactgcaacctctgcctcccgcgttcaagcaagtctcctgcctcagcctcctgagtagctgggattacaggcatgtgccaccaagaacggctaatttttgtatttttagtggagatgggatttcaccatgttggtcaggctggtctcgaactcctgacctcatgatccgcctgcctcggcctcccaaagtgctgggattacaggtgtgagccacctcgcccagctgatttatatctttttttttttttttaaagcagaatgcacccatgccacagtgctccttcctgcagcctgtcaggcgtcggcccaccctgcaacatccaggatgtcatttgagccctggtcacacgaaagcactgcatgggatgaaggtggtttatttatttatttttattttattatttatttatttttttgacacagagtctcgttctgttgcccaggctggagtgcagtgacacaatctcggctcactgcaacctctgcctcccaggttcaagcaattctcctgcctcagcctggcgagtagctgggattacaggtgcctgcccccacgcccagctaatttttgtattttcagtagagatgaggtttcaccctgttggcctggctggtctcaaactcctggcctcaagtgatccccctgcctcagcttcccaaaggtgctgggatcacaggcacaagccactgcgcccggccgaaggtggtttcttttaagcaatacatttgtattgagaaaaacaagttcttggccgggcgcggtggctcacgcctgtaattccagcactttgggaggccgaggcgggcggatcacgaggtcaagagatcgagaccatcctggctaacacggtgaaaccccatctctactaaaaaaaatacaaaaaattagccgggtgtggtggcaggcgcctgtagtcccagctactccggaggctgaggcaggagaatggcttgaacccgggaggcagagcttgccataagtcaaaatcaggccactacactccagcctgggtgacagagcaagactctgtctcaaaaaaaaaaaaaaaaaaaaaaaaaaaaaaaaaaaaagaaagaaaagaaaaaaggaaaaaaaaagagaaaaacaagttcttttaaatctctaggtaaaaataaaataatttctcacacacagccaagtcaactgcataccagagtaccaagcatagtttccacatcagaggcttaagctctggggtaaaagcattttctttaaccaggtgtctgttaattcactcatatcaaagagaaaacttggctgggtgtagtggcttatgcctataatcccagcactttgtgaagccaaggtgggtggatggcttgagcccaggagttagagaccagcctgggcagtatggtgaaaccctgtctctattaaaaaaaaaaaaaaaaatggccggacgtggtgactcatgcctgtaatcccaacactttgggaggccaaggtgggtggatcacgaggtcaggagattgagaccagcctggctaacatggtgaaaccccatctctactaaaaatacaaaaaattagccaggcgaggtggcgcgcacctgtaatcccagatactcgggaggctgagacaggagaatcactggaatccgggaggcggaggttgcagtgagccaagatcgtgccactgcactccagcctgggcgacagagcgagactccgtcaaaaaaaaaaaaaaaaggctgggcgcagtggctcacaccagtaatcccagcactttgggaggtgggcagatcacgaggtcaggagattgagaccatcctggctaacatggtgaaatcccgtctctactaaaaaatagaaaaaattagccaggtgtggtggtgggcgcctgcaggagaatggtgtgaacccgggaggcggagcttgtagtgagccgagatcttgccactgcactccagcctgggtgacagaacgagactccatctcaaaaaaaaaactatccaggtgtggtggtgcaagcctgtagccccagctgtcaggaagctaaggtgggatgatcgcttgagcctgggagattgaggctgcagtgagctacaattgcaccactgcacgccagcctgggcaacacagtgagaccacatctcaaaaaaagaaagcaaagaaaactcttcattagaaactgaacatgctcgctgggaatgatattcagggcacagggcaattccttacaggggcacacacccaagggcactgctgccaccacatgggaagttgtgacgggagggaggagactgagggcaggacacaagacatggagacacacattctggtctgtctgaccatggagctctgtccacacccaggctgcctgctggctcccaaccaccacacacagtatctggcgtttctcacaggtgtcggcttctctctctcgagtccatctgctggccgtggacctggctattcggggcaggcccatcctgcccacctccccacactctctcaagcctctgtctctgagcactgcaggttttgtagtgttccctcgtctacctctgagaggccaggctgactgaagagctcctgagaaagccaccaggacccactgctaaaggggttggtccagggtcattgccaggctgggatctgaggtccccacacatagggcagggaactccccagccatagactctgatgggggtaccagtgtggactccagccctttacacggaggagggagcatgccactatggatgctgagcagcaggaggtcaggggccccgctttcacaatgtgccatcccagaagccccacagccaggatctggacctctctgacacaactccaggtcacagagacccagatgtcagggatggagggacttgggcacctgccttgctattagctccaaggctgctggcttcatgtcacagtctgtacaacagctggtggcatgagcagggctaggaccagcactcagcatgacttcctagaactctagggacttaggggctgaggacttcccagggtgaaagaccatacctgggacagcctggccaaacagggacaattgatcaccatggaatcagtggacaggcccaagaatggatgggcacatgaggtcacccaggatcaggcaggttccactgaaggaggctgcaaaagatatatccaatgtcctaaccccggaactctcagaatgtgaccttattaggtctttgcagacataattaaggatcttgtgatgagatcaccctgaataacctgggtgtgccctaattccaatgacaggtgtccttatgaaggaggcaaagggagttctgacacggagaagagtggtccatgtgaagatggaggctgatattggagtgatgcagccacactccaaggaacacccggagccgccagaagccggaagaggcaaggaaagacccccacccagagccgtcagagagcacagtactgctgacaccttgatttcagacttctggcttccaggactgtgagagtaaatttctgttgttttaaactgcccagtttgtggtagtgtgttatagcagccacagaaactaatagagactggtctagcaccctcgacagaatgtgtgtgttgtaaggggctctcctgatccctagtgatggggagtcagaggactgcttagtgtctgaacagagggttggggaagctgggttgtcctgaagaaccagcagtccccacttggcagaaagggaccctgaacttgtgggaggtgggggctgaggggcacctgctagccatgtgctaacagcatcttcggattggtccccagatgccctgctcccaggggtggctcctctgctgcaacaagaacctgcctcccagcaccagacacagcaggtgggagctgtggaccatggccgagtctcttcgtctccttgatctgctcccaggatgcactgtccaactatcccacctgtaggtgggtggcattccagccatggacccatgatctgaggctgagcacagcaaacacaatcgaggctctgggtcccaggtcccaggagcccgtccttgatggtgcattacagctctcccaggctgttcttacagtgacctcccacctgccccaggtgagcatgcttgcacctgggtgctcgcccagcctttctagttgtccttagggcttctggtgttgggaacaggatgcagagttaccaatttagggggactgagaggttaacgtggccaaggctgagccctgcagaactgcagagcaacagcacacacaggaaagctagtgaggttcaacatcctcatggaggttgcacacggcacaatgaggtcttatttgcccaagagaatgtgcagggaagtcgccaggcacggtggtgcatgcctgtaatcccagctactcgggaggctgaggctggagaatcgcttgaacccgggaggcggaggttgcagtgagccgagatcgcgccactgcactccagcctgggcaacaagagcgaaactccgtctcaaaacaacaacaacaacaacaacaacaaaaacagaatgtgcagggaagtcaacgttggtggctctgaggtgtggaggacacaggctagtgcccagctcagcgtggctccacctctctgagccacagaccaacctcacccacactgacagtcccaggggacacagactctagcccctatgtccaattctacactgtgcacgcaatgggaagaacagtgcatcatgcactgtacagcagaagaaatgtcctctgagtgcaggcacagctcccttctgtgtctgtcctcccgacagtgcctccaccctcaaggattagcaagcttcaaccctcgcaggacatccactgtgtcagggccaaacggtgctgcatcctgctctaatagtgagtgaaggaggggaccgcagacaagaagaaatgaacaagagaccgtttaagagagaaaaagacgtgaagaacatcagacagggagcagcgcgagggcgccagggagggaggcagcggattcttcgggcctctgtgaagagggggcatgaaaccggtctgcagacaaggaaagagcaaagtgcaaaggccaggatgcgggggcagagacggtagggaggccggcgtcggcctcggctagcaggtgggcttgactccgagagccgcaggccgccaggatgggtcccgggcctggagcctcccctcgcgggcttcaatgacacccagcacggaaacgcgggggccagaactacagaagcccgtcccgcccggaactcaaggtcgcgagtgctgtgtggccggtccggacccggagcgcgaggaccggaagtgcgcggcgtcacgcctctgccccggaccccgcgcgcggaggtggagaggggactggggtggtggccgcgctatgcgccgggaggtccccgcctcgcaggccgaggttgcgggtccgcgcagaatgccacttactctctggaggcggcccgcacgggtccctggtccccgccccgcatgcagcgcggagccgtcctcccgccacctccgggccgccgcggcactgagggacccgggccacagcaagcgcaggcgggaacccgcgcggggactgctgggaaacgtagtcccgtcatgtcccgctttgacgctgcggagaaagcggtgtagggagaggcttgggcttcggttatcatagaaacagaggccggctacacctaaaaggcggggcgtggacctaagtcgtcgccaaagaaacggcgttctggacggggacgtagggtcccgcccattccttctcgtgaaagcgggtgactggtcatgattatgattgatagcctcctctcccaatctgatttctaagaggtcccaacccggaaccgacttgcggttcgcaggctcccctcgggtgggagagttgggctgggaagcacctggggagctctgaagtgtcttggtgagcgcgttgcgagtcagaccgataacatcagaatctgggactgggcccgagcatatgcgcgtcaaaactcctcagttaagtctatttttttgtattttttttggtttgcttttttgagacggggtctcgctctgtcgcccaggctaatgcagtgacaccatcacggttcactgcagcctcgacctcctgagctcaagcgatcctcctacttcagcctccagagtagctgttaacaggggcgcgcgccaccacgcccggctaattttctttcttctctccctccccctccttctccccctcccttcctcctcccactatgtcgcccaggctggtctcgaactcctgtactgaagcgaccctcccacctcaccctcccgaatagctgggactataggtgggagccaccatgcctggatagtttttttatttttatttatttatttattttagagatagggtctccatatgttgcccagactggtctggaactcctgggctcaagcgatcctcgtgtctcagccttccagagtgctgggagtacaggcttgagccactgcgccaggcccctagtccggctcctagttgattctaacacgtgcggccccattggggaaccacagcctccccagcccctttgggtgttgctgactctacgggccctcccaggtaggatgaactggtcacgcctcctacccatttgtaacccccagctcttgcccccatctattgtgtggctcctgccctcaatagggacatctaattttgttggccagtccagcacatatattgcatgtaacgacccagtttgccccacctttctgcctccactgcatctgcttcagggatgctgggactgttccactccctttctccatcctttgggtgtctgcacatcgaaagccttgtcaggaggtctatctccctgcccaagtacaaaactcagggcttaccaagctaattgagggcgagcaggaggctgaagggcacttggagggctgcccgccttgtgggtcccttggtggctgaagagagttgcacaggaaggccttgacaattgtcacagagaaaggagtgcagctgctggctctgtgtgggtgtgcagatgtctgacaggttcagccactggccccaattgggacacaagtgggatttctttttttttttcttttttgagacagtcttgctctgttgcccaggctggagtgcagtggccgcgatctcagctcactgcaacttccgcctcccaggttcaagcagttctctgcctcagcctcccgagtagctgggattataggtgcccacgacctcgcccggctaatttttgtatttttagtagagatggggtttcaccatcttggccaggctggtcttgaattcctgacctcatgatccacccgcctcggcctcacaaagtgctgggattcaggcatgagccactgcacccggcctgacacaagtaggatttctcacacctgtggatgcactgctactggaggagtcttgagcctatgtggaagaacttcccactcccaggcacagaaagggcctccctctggagtgaagattctggtggtaccacaggcctggccaccacacaaaggccttgtccctgcagggctggcatggggtgactggcagccctggagtggagtttgaagcaccaatgaaaggcctaaccacttggcaggcacaggtgcgggggacttgtctggaggggaccggctatgggggctgtgacagtctgtaggctttcttcacttctacacaagcctgttgtctaagtggaccctgcagggttcatgcaggggcagcaccagagaagcatcttgtgacaatggttacacaggagcgatttcaggaatgagactgaatcaggcaaggacctggagaggaagctccagtggggctcccacccaaggggtccaactttaccaatcccacaggtccccagtctggggctcattctatgtctgtaggcctgggaccctgcacccaggagagttgtcctgctaccggccatccctccgcagaggtccccctctggctctatgctgtcttcagcaaagggcctctgctccatttcacacctctcctgagggcctggggtagcttactgcgaagcagcctcagggaatagaggcttcagcagggcatcttggcccccaacacagaatcctggttgtaggatctggaagaacagaggagaaatggaagttggcagttcccaggaggggagaaggtgctggtgagccacgaaagcaaaccccagtggctgaagcatcctggatgactcggccacatttccttaagaatctttgtgtgtgtgtgtgtgtgagacggagtcccattctgtcacccaggctggagtgaagtggtgcgatcttggctcactgcaacctccaccgcccaggttcaagtgattctcttgcttcagcctcccgagtagctgagactacaagcgcccgccaccacgcctggctaatttttttgtatttttagtagagatggggtttcactgtgttagccaagatggtctcgatctcctgacctcgtgatgtgcccgcctcggcctcccaaagtgctgggattacaggcatgagccaccatgcccggccctcttctgtctcttataaggacacttgtcattggatttagggtccaccctactaatcctagatgctctcatcttgggatccttgactaaattacatctgcaaagatttttttccaataggtcacattcgctgggtctgggtattagggcatgaacttacctttttgggggccaccattcaatccattacaggtgggcatcccatagaagcagacagtggctaggccaaagtagcccatgaagtatcagccatgggcacaagatcaagtttgggatgcggcagggccaggcttggctctgccaggcaactgggtggactgaatccagcacactccaaacgagttgataatcaggctggggacttcaacagacaaccaaggtgccagtaaaggcattaaggagctatcacggccaggtgcggtggctcacacctgtaatcccagcactttgggaggccgaggcaggcggatcacgaggttaggagatcgagaccatcctggctaacagtgaaaccccatctctactaaaaatacaaaaaaaatagccgggcgtggtggcgggcgcctgtagtcccagctactcgggaggctgaggcaggagaatggcatgaacccaggaggcggagcttgcagtgagccaagattgcgccactgcactccagcctgggcaacagagtgagactccgtcacaaaaaaaaaaaaggagccatcacaaggatgtaagatcagctaacagtaagactgtggctggtagggtggacaggcaaagtgactgcctggagagtgggcaggtggcccagcagggcccagagggtgccttcccagaagtgaggagtccagtctggggccggccactcaggatggacacaatgtaccagaagtgaggtagatctctgcagagtctctggggtcctcatccagtctgaagaacacagcaccagcagccctagatctatgaggtcagactctgcatcttatcgtagcaccttggggacctggggaggctggaccaccctggacctggtggcgggggtggggggtgcatgagtctcggctctgcagtattcaccacgccacacttgagggcacctgccctctgcagcacgatgagtcattctcatgaggtctgtaaagatgtccattatcaaatgaccatggtagccaggccacagggttcacattgacgttgcctcattgcattctcatttccacactgaaggggaaaacaggttcagaggggtgggctcactgtcctgatgagtgctgcctgttttctcccaccctccctacaaccagcacccccatgcccctcactcaagaccagggagaagcccacctagcccctcctgcaaccacacagaccccagtgggagccccaaggctgctactctgcacaggatggagggcaggggtaaaggccattaggcggtggcagtaggccgtgcccctcaccagaggctgaggtctgaccccttgaccagcccagcttcagggcatgtgtcctttcatgagctgtgactgaccacagtccaagggcccactgtggggagtcctcagcatatttggacagaaacgccccagaattggggtaagaagagcctttacagtcaggcagtgaagaaacacagctgctgggcacctgctatgtgcacgcctcagggatgggagtagggggcaggcccagccctgggacctgggtcaggtggctgggcccttcggatcccgagttggagggataaccccttggaggcagagatgggcatcagagacagggcggccccaggtggtcctggagtcgcctcgtaaaggttatgtctatgcctgctgcaggcagagacacagtcaaagtagttgctacctctggaaagtcccagttctgctcatgagcctagatctaagaggctgggacaggcagaggggtatgaaggggtcatgggcaggcagactgtccacactggctgccagggtggccaagtgagtagagtgagctggggcactcactaccgtgccaaccccacgcacggatgaggaccccgggtcgaaggcccacatcctcaatcccacgcaatagttcaggccctgtgagagggttcgctgtctgctcccagccagggctgagctgttcagaggccctacctgttcagaggcagctgggggaagggacagaagttggggggcaggggattgtgtgctggcgggaataatctccttcatctcatggctaaatcttccatccctcctttcaacctttggccagaaacctacgtttctgacccttggagaggtcggccagttcaagaggcacccctgagagccacgtctgcagacacgagggcctcgtgacgtgagccctgagggcagggggctgcaacccctcgcgcgggctccccggccgtggaggacacaaggacaaacacgaagggtccccgacctgccgaccccctcctcccggacaccgcgcgtagcctgtaggctacctccgcgctccacccagagacgggtcgcgctgctcccgccgccgcaaccccgggccctcgtgccggcggtctcccctcttccacgggcgagattactgcatagcagaggtgaagggcgcggaggctgtgggggaacccagcgtggtatggcaggaaaggtcgagcagggaaacaggcccagccagaggctcgggatccggggctcgcgagcgtggtgctcctgggccgggcggtgggggaggggccgcgtgtggcaggcacatgcgcacggcaacctggacctgcggagggcggcggtgaccactgggcctcactccgctaacccaggtccgcatcaggcgcgtgccggtgaggcggctgtggccgcggcgaggagtcagagggaactgaactggctactcccgcggcaggtgggatttaaggtcagcagctgaacaaagaagcgagcgctggccagacttttttctttattagacatggctgcgttggtctcacggaaatctctgcgcttttgcaggcgcccacaagacagggcaactacggggtagcggacatccgccaggcacgcttctagggccgcttctgcaactgcgcatgcgcttgggctgcacccattccgtctagcccaaaaggttcctctacaaccttcctccggattggtctatagggacacgatggccttttacgcaagcgtcacccgtgctgacccggaagttttcttcccagttaaaagtgttggcccgcggcgcgcggcctcttcctgtctgtaccagggcggcgcgtggtctacgccgagtgacagagacgctcaggctgtgttctcaggtgagaccgccgcggggccggggatcctagggacggttcatggtctttcggggatagtgccccgcggcctgggccttttctcattaggtctcatttctgtctctggaaaagaaaatgtagaagaaacgggcgcgggccgagttactcttgacttctttctggtgctccgccgcttctagcttttccccatagcggggcttggggaacttggtttgaactatgcggttgtactctgagataggaagtttccatttcttagggacacgatgccctcttttgctctgtgtaactttccccccgtaatagcagcccctagagccttcatactgtcggtcaagaatcgaaacctttgggttgattgtgccacacggtacctaccgtggtccttgatgtcatataacggtcccgcctcacggccaaagaaacagtccgagacggaacgttgacttgggtcaaagaccatgtaaatcgcgagattgtggtttgaattacagcccatgcagtgtgaggacgtatggcatctgctgagccattataccttggtcccagtgcagcagctgttgactggtggctgccaagtcttgggcccaggggttctaggtgaaagacagatgcttcttgctgacagctgagtaatttttctagtgcttgaaaacacgttcacggcctttcttggtcctttgcgaccccccagttcatcactagatggcggctagcctcagagttgggaatgagtgcgcctttgctccatgctagctgagctctgacgtttttttcctgtcatcaccctgtcccaggatgaccgagtgggagacagcagcaccagcggtggcagagaccccagacatcaagctctttgggaagtggagcaccgatgatgtgcagatcaatgacatttccctgcaggtgaggggaacttggtgattggccttcctggctgggggcggacattattccaggaaggcacacatcaaacttgttgctgtgccattaagtcaagaatagagatcataacaggtaaagaagggatcccttgaccaccacatctaccacatctgctcttacgtcctgttcaaagatgactacaacttctgtcatgagaggactccttcaccagaaggagcatcacatctcacatatggtatttttgttactgtttttgtagtaaaatacataacatccagtgtcattcttttgcatgtgaatatccagttatccagtaccatctcctaaagagatgttttttttccctcaattgaatggccttggccacttgtcataaatcagctggccgtagttttttttttttttttttttttttgagacggagtctcactctgttccctgggctggagtgcagtgacgcgatctgcctaccgggttcacaccattctcctgcctcagcctcctgagtagctgggactacaggtgcccgccactgcacctggctgatttttttttttttatttttagtagagacagggtttcaccgagttagccaggatggtctcgatctcctgacctcgtgatccgcccgtctcggcctcccaaagtgctgggattacaggcgtgagccaccgcgcccggcccagatgtatgggtttcattacagactttcagttatattccactggtctatatgtctgtctctatgccagtaccacactttcttgctttgtattaagttttgcaattgggaagtgtgagttgtcctactttgttcctactccgtacggttttacacataccctttttttcccctccccatgaaggcatcattaagaattttgtgggccttaagaactttagcttttgtgagcccttcctccattaaaagaaagtgtttgaaattatattttgtgactgcattgatataaagatgaatataacttgggttgcactttattcactttcctcctctttttttttaatcattaaagttttatctttgagataagatcactctctgtcacccaggctggagtgcagtggtgtgatcacagttcactgcagcctcaatacacctgggctcaggggatcttcctgtcttagactccaactagctgggaccaaagatgcatgccaccaaacctgctaccttttgttttataaagaatgaaaacttttttgttgtctgtaaagatgtcaggggacttaggcactatgcctaatggataattcagccttgtttttcactctgaatatcttgtagatcttggcttttctttccttcaggggtttatttcggggggtccaaaaacattttaaatattattattattttttgtttgtttatttatttatttatttttttgaaacggagtttcgctcttattgcccaggctggagtgcaatggcacgatcttagctcaccacaacctccgcctcccgggttcaagcaatgctcccgcctcagcctcccaagtagctgagattacaggcgcacaccaccacgcctggctaatttttgtatttttagtagagacggggtttcaccatgttggttaggctggtctcgaactcctgacctcatgatctgcccggccacattttaattatttatttattttttgagacagagtttcgttcttgtcgcccagtctggagtgcaatggtgcgatcttggctcactgcaacctctgcctcctgggttcaagcgattctcctgtctcagcctcccaagtagcggggattacaggcacatgccaccgcacccagctaatttttttatttttagttgagacagggtttcatcatattggtcaggctggtctcttaactcctgacttcaggtgatcagcctgcctcagcctcccaaagtgctgggattacaggcatgagccaccacgcctggcgttatttatttatttgtgagacagagtctctctctgcctcccaggctggagtgcagtggtgcgatctcggctcactgcaacctctgcctccccagggtcatgcgactttcctgcctcagcctcccgaagtgctggggttataggcatgagccactgcgcccagcccacaaacattttcattataggcccagataatgttttagactttgtgggccacactggccactgttactttttttttttttttttttttttttttttgagatggagtcgctctgtcacccaggctggagtgcagtggcacgatctcggctcactgcaacctccacctcctaggttcaggtgattttcctgcctcagcctccctagtagctggaactacaggtgcatgccaccacacctggctaatttttgtctttttagtagagacagggtttcaccatgttggccaggctggccttgaactccttgatctattaaacgtttgttaagtgcctgttccactagggaaataaacatcaatgggagttcactgtattttaaacacctgtgcagggctccactgttgggccaaacccttcctggggaatttggtgtttgcaattttttgctgcatagtgaaagccctgcgtgaatgcccttcacgagactgtgagttttttttttcttgcagccagactatgaaatagtactgagagtttcagtgtcctgtgttcttttcccatcattccttgtatttgtagaaacaggtattttgtgtatattctcagaggcaagtgatagaatggccttgggtacattttgtaatggaactatcaacagcagtctccttcgaatgcacatagctcctttcttcccctttacatactcaaggttaactttttggcatttttctagatttttgtgtggggatggctatgtaagtataagaagacttgttaaatgattgttttaaaactgtggttctgggccgggcgccgtaatcccagcactttgggagactgaggcgggcagatcatctgaggtcaggggtttgagaccagcctggccaacatggtgaagccccgtctctactaaaaatacaaaaattagccttgcatggtggcgtgcacctgttgtcccagctacttaggaggctgatgcaggagaatcgcttgaacctgggaggtggaggttgggatgagctgaaatcatgccattgcactccagcctggccaacaagagcgaaactccatctcaaaaaaaaaaaaaaaaaaaactgggctgagcatggtgacgcatgtctgtaatcccagcaacttgggaggctgaggcaggagaattgcttcaacccaggaggtggaggttgcagtgagccaagattgcaacgttgcactccagcctgggtgacagagtgagactccatctcaaaaacaaacaaacaaaaaacccaaaaacaaaaaagttctcagccaggtgcagtggcttatgcctgtaatcccatcactttgggaggctgaggcggacggatcacctgaggtcaagagttcaagaccagcctggccaacatgtccaaaccccagctctactaaaaatacaaaaattagcctggcatggtggcatgcacctgtagtcccagctactcaggaagctgaggcaggagaattgcttgaacctgggaggcggaggtttcagtgagccaagattgcaccactgccctccagcctggaaggcagtgagactccatctcaaaaaacaaaaaaccaaaaaactgtggttcctactctggggtggttggtttcctgtcttagagaacacttagcaatgcctggatacatttttagatgtgaaaactgaccggggtggtgccaggcactgtggctcatgcctgtaatttcagcactttgggagcacaaggcaggcagatcacttgaggtcaagagttcgagaccagcctgctcaaaacagtgaaaccccttttctattaaaagtacaaaaaatttagctgggcttggtggcgcgtgcctgtaattccagctactcaggaggctgaggcaggagaatcacttgaacccaggaggcagaagttgcagtgagccgaggttgcgccactgcactccagcctgggtgacagcaagactcagcctcaagggggggaaaaaaaaaactaggccaggcgcagtggctcatgcctgtaatcccaacactttgggaggccaagacaggcggatcacaaggccaggagttcaagaccagcctggccaacatagtgaaacctgtctctactaaaaatacaaaaaaactagctaggcttggtggcaggcccctataatcctagctactcgggaggttgaggcaggagaaccatttgaacctcggagtcgtaggttgcagtgagctaagatggcaccactgcacaccagcctgggtgacagtgagagactcaaaaaaaaaaaaactgaaggggttgccagtggcataccagatggctgttaaacatcctatagtgtgcaggacagccccccagacaattatctggtccaaaatctagtctccttagattcccactcttccattacgaaggaagtgtactttttagcgacttggtaaagtcacctgttcagggtttttttcctcatggtggatggggcttacatccaagtcccctgttgaggcataccaggatcccagacagctgttggactaccccgaatgggtacttgatctctcctctggtgtctggccaacgcccatgctgctcctgaccattttcccttcatttcctgctccctgctgccccaggattacattgcagtgaaggagaagtatgccaagtacctgcctcacagtgcagggcggtatgccgccaaacgcttccgcaaagctcagtgtcccattgtggagcgcctcactaactccatgatgatgcacggccgcaacaacggcaagaagctcatgactgtgcgcatcgtcaagcatgccttcgagatcatacacctgctcacaggcgaggtagggctctgtggcctggtgagggcaggctgtgccctcagtacacccgaaagccccacggagtgtatgtcaggcttatcccctgtgtggtgtggtcactcttgttttaggtatgaggaaaggggaggaatgcatggggctggatgtcaggctcatatcccccttctctctagaaccctctgcaggtcctggtgaacgccatcatcaacagtggtccccgggaggactccacacgcattgggcgcgccgggactgtgagacgacaggctgtggatgtgtcccccctgcgccgtgtgaaccaggtgagcctggggcttatgcacgtggcagggtggacacagccacgggagtgggtggggtcttgcctggggcaggaaggctcctctctgtctgcatgttttacctgcagcatcacttcctctaggaagccttcctggattcccaccctgcataggggctgatccaggctctgggtcctcttcgggaacacatttggcagaggtcttctttctttcctttgggtgtatatttttacactgtgtgtatatgtactttttttttttttcttggacattttgagaatcagttgcagacattttgattgtgttttccctgaacactgcaggtgtctttaaaaacaaagatgacctacccccgtcgtcacccccaggaaggaatttatattcacagcaatagtcgttgttccatttagcatctgtccccagaatgccagaatgccctttatagtggcgcattgtcaattgggtccaagttaaaagcaaatatattgccttgttttttagaaataattgagatggaatctcagggtgttcttgaattcctggtctcaaatgatcctgtcccctcagcctcccaaagtgctaggattacaggcatgagccaccacacctggccgccttttttgttgtcgtcggtttttttgtttgtagaggtggggtttcaccaagttgctcaggctggtctcaaactccctgccaaagtgttcctcctgcctcagcatcccgaagtgttacaggcgcaagccaccgtgcccggccgtctagcagtttgctgttgaggcaggtctcaatctcctgtcactggggacgcaacttcagcctgtgtgtgtgtgtgtctggacacttgctcttgtgaccctctatctgattgcaaatcaggcatgatgccaccacctcttgtctcagtgggcctatgggtgacaacgtggctggcagcatcagttgggagtggccccagggtgctggaggaccgcagtctgtccttctagcctgacccctgctgtcttcctaggccatctggctgctgtgcacaggcgctcgtgaggctgccttccggaacattaagaccattgctgagtgcctggcagatgagctcatcaatgctgccaaggtgggtgagggcactccggttggggggtcttaagttgggcatttgtgggggtccttcagaattcagagctgtgtgtctccttgcagggctcctcgaactcctatgccattaagaagaaggacgagctggagcgtgtggccaagtccaaccgctgattttcccagctgctgcccaataaacctgtctgccctttggggcagtcccagccacctgtgctgttgtctgtcttcggtggggggatgtgggtggcatagccctggtggccttgggagctgctcaccttcctgacctgttggcctgtggggacctggaagtattgctgactcagaaccatggcaccccagggctagcaggtggggcactggatgcaggccaggctgcctggagtgtcccagcaggtactggaaatgagatggggttatccataacttctgagggcgtggcacatgagatgttgctgtggtctgggtggatgggtggcttgggtgcctgtgaggtctgggtagtcacaagaccatcctgagaggcttgtcaccttgaagtagcactggggagaggaggaaagctcagctgtttagggcacacgatttcagacccctagcttcacccccctcttggagtgtggggtggtttcacactggcgaggttgtgctcctggttacctccccggctacactggttgtggctgcaccctgggcctgcacacccagtttctgtgggctgtacgggttcccttctgccagtgtccatgcagtgtcatcaggctgctggggacaggttgggacccacccagggccacaggctggtgactctggtagaagactcatcaggttctgaagggtggggtgggcccaagcccacccaccgtgtgccatcacccttccaccgcccccaacatctggccaagacaggcttggtgttcatcctggtggggctggcccagggggcggggcaggcagtcaaacgggtccagcgggtacctgggacctggaggggtggtgccggttgagcaccctccccctgggagggtacttttgagcccagctgctggcaggccaggaacagacagggacacgccactggccagagggaggaggcttccacaggtaggaaggcgcccacaggctggctgcggtctgtcattactctgtggggggtgcctatctctgctcctctgtgggtcaggtcctttccatccctgtctggggtcctccccatctccgtgttcaactgcggtctgtctctccgtttccaattcaggaactggtaccccgtgggtccattcctatccccagtctccgcctcgggcctccccatctcccctgctcctcgacgctagctacacccttctcgggatggggtgctctgtactgggggatcctctctaaagtacagtccccagtcttccctggattccctgctggtctcagaacccgctccaggctccaccgcctccttccctgcctgacctcctctcctcccaggtccatccggatgccctgccctcggccgttctggctccgccattcccgggccccccagggctcgggtcccagctccccaggctcgctctctgcgccccgctccccaagcagaggggaagaccaggaggaggaggaggaggaggaaggggacggcagcccaggctccggccctatcctgccccccgcctccccggtggagtgcctcatctgcgtgtcgtccttcgacggcgtgttcaagctgcccaagcgcctggactgcggccacgtcttctgtctcgagtgcctggcgcgcctatcgttggccacggcgggcggcggcaacgcggtggcctgtccggtgtgccgcgcgcccacgcgcctggccccccgccgcggactccccgcgttgcccacgcagtccggtctcctgccccgcgacgcgcgcgcaccgccctctcgccagggctccgtgcgcttcgaccggcgccgcggccttctctacctgcggccgccgccgcccccgcccgggccgcgcaaggcccgcgccccgccgcccccgccgcctctgcgcctgggccgcccgctgtcgcgccgcttgtcgctggccagcccggcctgggtcttcaacgctgccgtggcgctggcggtgctggtggccgcgggcctcgtggtctcgggcgtctacatcttcttcctcatcccgcacgccacctcctccggccccccgcggccccagctcgtggcgctcgctccagcgcctggcttctcttggtttccgccgaggcccccgccggggtcgccctgggcccccgcctggacgccgcgccccacgggccctgacctggacacggccctgccaggaactgcagaagatgcgctggagcccgaggcgggccccgaggacccggcggaggccgagaggacgctggacaggcgatcggatggcacgtggggcacagaggctggccccggctgggccccgtggccacggggcgcgaggaggctgtggggctcacaataagtgcgccagtactgcagtcctgcctccaggcctggcacctccgtgttatctggggcccttagtagggcgcgcagcacttacctgtttctccagattggggcttagggcaagcatccttggcattgtcaccatggggctggaccctctcaaggagcaggcaccgcagtcgtcccacaaggatcctctgggaacacccctgacccccattcttgtggctgtccagcggagggtgccctgaccgtgacctctataagggtcctgctggggcttgctcctgctccgcaacccctactccgtgggggtgcagttggaagcatccctgatcctcatcccttgtaggagtccagctgtggacgcccccgactgacatccatgcaggtgcccagccaggggcagccccacacggatccttgaacgggtcttgctgggagtgcccccagtcatcctcaccacagattcctgggggagcgtccttgccagcactggaggccaaagcactcatccttcggattggccataggttgcaggggcccgcctatctttggagggcagagctgctgctgctattcttccttggtcacctcctccccaactggctcattgcaggggacgtcccaccactccacccatctgtggagtttgttttctactgcctgcaggctgggcctgggtgggctccagctgtctacatgctggtcccgggtgtagagttgccatcctgtacacctggttggggctggggctcaggcttgaagtaacagggtgtcctggccagggctggggaggaacttgagccttaaagactggctcccgccccaatcctaagtcccaaactgctctgggagcctccacttccccctgggtcgtggcttctaggatcctcccaatatgctgtggtgcagctgtgcttatcatggctcagaggccaacatcaccccaggggtcagacagaggcagacaatggtgggggtgggagtcctggacctccttggttagccagagggatcctagtccctttccctggccaccagagtccccatcacccccgattaatatcttgatgccagttactgcacttcttcctccagggctccatctgtcctgcccagcctcctttcttgtacctcgaggtgaaccctgagccttcccaatagacagcagcctccagggaaggtggcatatgggctcctgtcctcttcctcccagaagtcttcctgggttagttatgggggtagatggcagctattctctgtgcagactgaacctggggcttctgtttcctcccaggccctgcacaccacccccccaatcctgcctcacctcactctgggatggagtgctgtgttttgggaatgggcacccagcatgttccaaagcgaaacgtgacttctatgtggctggaggctcctgtttgatttgttaacgtgtgtcctcagcaccagcatacagtaggtgccaaacaagggagtgacagaattgcaggtgacccaggcagcctgggaatgcaccctgggcccaggactgtctagagctagctctggtgtgagctgctgcttccaggtgggagccagaggaggaacactagggagtccacagtgtgtcttcccagaccagttcttgcccacacccacatgccgatgtcacccacaggggctgggaccagtgtactgggtcactgggcagccacagcccagcctcatagggaagaaacctggtcagacagccgcagagttggtggtctattcattttctgtggctgctgtgacaaaatacccccaacttaattatttagaacacgcgtttattttttttaatttatttttgaaacagagtctcactctgtcgcccgagctggagtggagtggtatgatctcggcttactgcaacctccgcttcccgggttcaagcgattctcctgccttaggctcccaagtagctgggattacaggcgcccgccaccatgcctggctaatttttgtatttttagtagagacggggtttcaccatgttggccaggctgatctcaaactcccggcctcgtgatttgcctgccttgccctcccaaagtgctgggattacaggcctgagccaccgcagccggccttatttcatttatttatttatttttttgagacagagtctcgctctgtagcccaggctagagtgcagtggcgcaacctcggttcactgcaacctctgcctcctaggttcaaatcattctcctgcctcagtctcccaagtagctgatattacaggcgcccgccaccacacccggctttttgtatttgtaatagagacggggtttcaccatgttggccaggctggtcttgaactcttggtctcaagtaatctacccacctcagcctcccaaagtgctgggattacaggcatgggccaccatgcctggctaaacacacacttcttatcttgcagttctgcagtccagaagtcaacgatcagtttcactgggctaaagttgagttgcccatagggctagttctttctagaggctctaagagagaattcatttcattagtttttccagcttctagggctgcattccttggctcctggctccttcaaagccagcagtgcagcatcttcagatctctctgaccctcctacctccctctttcacttataaggacactacaagtacatagcgcccacccgaataatccaagatagtctccccatctcatgatcattaatttaatcacacctgcaaagtccattttgtggtgtcaggtaaaagattcacaagttccagggattcagaccgggatatctttggaggccattattctgcctaccatagggtctcagagatcctcctcattgcttccctctcccacccaacctaggggagtgggggtgtgcaatggtatttctgacccagacaggccaagcaggggagtcagaaaggggcccttgcctggtgttgcacagaagagggagaggatgttctgtgcctgagggtagaccaggaaggctgcctggaggagggagctgtatcctaaaggatgctcaggagctggcattgaggccagtggcatagcctgcacaaatacaggaggacctggggaggccaggggtggggctgggggtattgggtggggctggccgcattctccgtcttaaccagctcgctcctaggtgcttttgtggcttctgcactctaccagcttggagccaggggcctcattctctcttgcagtaaaatgaggctgatgactgagcctaggagttgctgggcatctggtctgctgattaccaccttggtgcccaatgtctgcctgcctatccactgctttcaaacaaagaggctgcctgacaccacccagggggacgcctcccacccttgcccagcctcagccaatctcctctttctcttcttcagagctggagttgtgccctcctatcctctctctgcccaccccatcactgctgtacaccctgccccttggcacttcggccccggacttgctcctcctggcaggcctgggtgcttgtgaagccgggtgccagagggcccagcacggcacggcctttgattctgttttctgtaaatcgacgacaataaattctctttttccttcatccacaagtgtttactgagcgccttctgtgtaccaggccgcaccagggtgcggagcaaagaccaacctcagggagcagatgaggtccaggcggctgaaccaaccgaaccatggttctggtagcactgcctcccccgccaccctcagggggccctgctccccaagcccttcccaaatcctgccgtccagctctcctccccaccttgcaggagggacgccagggcccggttttcgggttccgccattctttcctcaatgagggtcggagaggtccctgcccacgccagacccgtccccggccgtcgcggcaccctcttgtgatcaggcggagggaccaagggccaagagcggggcttcgccggacgctgggagcgtcactgtccagactgacagatggggaaactgaggctgaccagctgggcagggcgtgcatacgaatctgggtcctggaagcgttctgcaagatcccttctcacctcaaccgcacgtgctggcatccttgggtttccctccttccccagatcacagccgcacttctctcctccgccctcatagtcacggccctgccttctccctcctcttgccccgggcgggccccgcccagaatgcggagaggccttcgaggaagcgcggaccaatcggaggccctatgtagggctgaagaggcgggactctggtcgccataacaactcatcacgcctgtgctgcgcgcgcgcgtcgccttagtgccgcagccctattacgtgaggtagggaaggcgcgccagactcgacggccaatcagggacccgagggcgatgttgccatgacgaccacgttgcgctggagattgcgacgggggctgaaaccgcggggaactcggggagcgagtggtgagaacagtgagcaccagcactccgatggcgctggcgagaggaaaggctgcggcgcgcagagcgaggctgcgggaccccaggatgggggacaggaggctgcggggcctcaggtgagcagcaagcgagagaccagtcccttcgagcgccctcacgcgttttgtccccacgccacgccggggacgagtctgtggcacagactcgtccccggccccgcgggcttaagttgtctgggggctgtcgctttgagtacagatcatatagttatgaatacattttaacgcagatccaaacacatagtataacgtgaggatcctatataaagtgagactcctcaaaaaaaaaaaaaaaaaaagatttttttttttttttagccggacgtggtggcgggcgcctgtagtcccaaccactcgggaggctgaggcaggagaatcgcttgaagccgggaggcggaggcttcagtgagccgaaatcgcgccactgcactccagcccgggcgacagagcgagagactccgtttgggggggtaaagtgtttttttaaatgcagtcaaattcgaacgtaggttgataggatcacatagttgatccactctaaccccacacccacttgcagacctggttagtgctgaggtcctctcatcccagggagtaggctagagttcgcactggctcccctggggcccggcttggcgtggcaaagctgggagtctcgccctaggttggggtttcctctgctctgtaagcctctgcagaaggagcagagggtggtgggagaagaagtgcccaagaggggccacaagctacctgtgatctgtgtccccccaccagggggatgggtgctttcatttttatcgttgtggaaaatttcacattaagtacttctccaaagaatctcccagacatctacttgttctttcaaaacataacagatttttttaaaaaacaatttacataccatataatttgcccattttgagtgtacaattcaaggctgggcgcggtggctcacgcctgtaatcccaccactttgggaggctgaggtgggcggatcacctgaggtcaggagttcgagaccagcctgaccaacatggagaaaccccatctgtactaaaaatacaaaattagctgggcgtggtggcacatgcctgttatcccagctcctcgggaggctgacaggcaggagaatcgcttgaactcgggaggcggaggttgcggcgagccgagattgcaccattgcactccagcctgggcaacaagagcgaaactgcgtctcaaaaaaaaaaaaaaaaaaaaaaaaaggccgtaggtctgaatagacccctcacctaagaaaaatagatacatagctggcaaataggcacatgaaaatatgctccacatcatatgccattagggaactgcaaattgaaacaataatgagatactactatacatctattagaatggctacaatgcaaaacactgatagcaccatatgctagcaaggttgtgaggcaatgggaactctcgtttactgctgatagaaaggcaaaatggtatagccactttggaagacagtttggcagtttcttacagaaagttaaatatagtcttaccatatgatacagcaatcacactcctgggtatttgcacaaatgagttgagaacttatgtccatgcgaaaaccacacaaattattatagcagctttattcataattgctcaaaacttgaatcaacccagatgtccttcaatagataaatggctaatctgtgttacatccacacaatggaatatcattcagcaataaaattaactgtgctaccaagttatgaaaggcatggaggagtctgaaatgcacattggtaagtgacagaagccagactgaaaaagctacatactgtatgattacaagtttatgacattctggaaaaggtaaagctatagagacagtaaagcagtgactgccagggactcagtgggagggagggagggagggagggaggaatgaatagtagcacaagtaatttttgggggcagtaaaagtattttgtactatattgtaatggtggatacatgaatttatgcatttgtgaaaacccatataatgtacattaataataatgtactaatattcattttacaatgttaacaaatgggccgggtgcggtagctcatgcctgtaatcccagcattttgggaggctgagcggggcggatcacgaggtcaggagatggagaccatcctggccaaaatggtgaaaccccaactctactaaaaatacaaaaattagccgggtgtggtggcacgcgcttgtcgtcccagctattcgtgaggctgagacagaattgcttgaacccgggaggcggaggttactgtgagatcgtggcactgcactccagcctgggtgtcagagcaactccgtctcaaaaaaaaaaaaaaaaaagaagaaactaaaatgaggtccaatgaagtagtgccaggaaaaacataaatgaactaactattaagcccaggaaaggtaagtggttaagagagaactttggtctgagacttcctggaatcaaactgtagcactgcctcccactggctttatgactcagggcaaatacttagcctatgggagactcaggccctggaccctctactcctctgctccacccgtgggagagatcaggcccatctcacagaggaacagattttttttttttcttttttttttattgatcattcttgggtgtttctcgtagagggggatttggcagggtcacaggacaataggggagggaaggtcagcagataaacaagtgaacaaaggtctctggttttcctaggcagaggaccctgcggccttccgcagtgtttgtgtccctgggtacttgagattagggagtggtgatgactcttaaggagcatgctgccttcaagcatctgtttaacaaagcacatcttgcaccgcccttaatccattcaaccctgagtggatacagcacatgtttcagagagcacagggttgggggtaaggtcacagatcaacaggatcccaaggcagaagaatttttcttagtacagaacaaaatgaaaagtctcccacgtctacctctttctacacagacacggcaaccatccgatttctcaatcttttccccatctttcccccctttctattccacaaaaccgccattgtcatcatggcccgttctcaacgagctgttgggtacacctcccagatggggtggtggccgggcagaggggctcctcatttcccagtaggggcggccgggcagaggcgcccctcacctcccggacagggcggctcgccaggcggggggctgacccccccccccacctccctcctggacggggcggctggccaggcagaggggctcctcacttcccagtaggggcggccgggcagaggcgcccctcacctcccggacggggtggctggccaggcggggggctgacccccccacctccctcccggacagggcggctggcagggcggggggctgacccccccacctccctcccagatggggcggctggccgggcagaggggctcctcacttcccagtaggggcggccgggcagaggcgccccgcacctcccggacggggcggctggccgggcagggggctgacccccccacctccctcccggacgggtcggctggccgcgcggggggctgacccccccacctcccttccggacagggcggctggccgggcggggggctgacccccccacctccctcccggacggagcggctggccgggcagaagggctcctcacttcccagtaggggcggccgggcagaggcgcccctcatctcccggacagggcggctggccgggtgggggactgatccccccacctccctcccggacggggcggctggccgggcggggggctgacccccccacctccctcccggacgaggtggctgctgggcggagaggctcctcacttctcagacggggcggctgccgggcggagatgctcctcacttcccagacggggtggctgctgggcggaggggctcctcacttctcagacggggcggctgccgggcggaggggctcctcacttctcagacggggcagttgccaggcagagggtctcctcacttctcagacggggcggccgggcagagacgctcctcacatcccggacggggcggcagggcagagatgctccccacatctcagacgatgggcggccgggcagagacgctcctcacttcccagatgtgatggcggccgggaagaggcgctcctcacttcctagatgggatggcggccgggcagagacgctcctcactttccagactgggcagccaggcagaggggctcctcacatcccagatgatgggcggccaggcggagacgctcctcacttcccagacggggtggccgccgggcagaggctgcaatctcggcactttgggaggccaaggcgggttgctgggaggtggaggttgtagcgagccgagatcacgccactgcactccagcctggacaccattgagcactgaatgaacgagactccgtctgcaatcccggcacctcgggaggccgaggctggcggatcactcgtggttaggagctggagaccagcccggccaacacagcgaaaccccgtctccaccaaaaaaaatacgaaaaccagtcaggcgtggcggcacgcgcctgcaatcgcaggcactcggcaggctgaggcaagagaatcaggcagggaggttgcagtgagccgagatggcagcagtaccgtccagcttcggctcggcatcagagggagaccgtggaaagagcggggggggggggagggggagggggaggagggaagaggaacagattttcaagaacgatttgaggatatgtattagcccaggacatgttatgggatgaccagtgtcttcaaactaggcagaaagaggggacagggtacaggagtcaggggaagtaggcgaaaaggtggactgtttagtaggggatcaggaacatagaaaagtggcaaggctagtgaccttggtacccagacaccaggggtataactcaggtaccaggtgtgagaacagctcaattccagggatacttccatccccagcttgcaatctccatggctgagcctctttgataacttttgtgctattcctggtttcaagtctacctggtccatcaatcagtgctcttgtctgcactccagttgggggaactcatgaactgtaaagggcaatcctgtgggggaatgaacaggttggtcagtccagcctagggcagactgacccaccatgacagtccaggggtactgatgacaggcatgtaccatgagcttgggggtgtcccacctgtgtctccactggagagaatacacaggtgtcactgaggaacagggttgcaaggactgaggatatggggtcagctgaggacatgttaaggagaggcaaacattgcacagctaggcactaaggagagagaaagggacacagcggggcatggccagaaaactggaattgagctgagtggaggcaccaagacctgcgagggcacaggctgggcaccaggtgtgagaacagcccactcctgggggcattcaccaggggtagatctcttcagggtccctctgccacaactagttttgagttcatatggtccacctgctggtgggaatgtagaagccttcagacctatgaaggatgatgagtttttgagagtccaggccaggagaggccaaaacaccatgaccccagcaagcgagaataatccttactccaagacaaacacagacctgcaaaaaatgaacattcagggaaggctcccaggcaggacccagtgggcccacacgcacccatgtcagtgcatgcagtgcctggaatcttacaggaagtgaccgagctgaacgtgaccagctgtgaagattcagagacttctgagccccgatcttggccactcacggcccttgggtagaatgtgtggggtgtccactcagccacttgttagaggaggtggcatgatctgggcctcagtgccacgaccaacagcgacttccaaggggaacatggaaagaacagaggaaaaaaaccagagttgaggctggggagagttatggtgccagtggtctcacccagcactgagtgcaaagttctccagcaccacttcaggtagaagctcctctggaccttgcctaagaactccgttcgtccgggaggacgcaggcccacctgctctaacatgaacgcgtctgaattcagcggaggacacccaggagcccggttattctcctgccagcgtcctcccctgatgtgtccctgaccccgtgctctgacgtactcagccatgtactcactctcctctcccaggcccccatacctgagatcaccatggcctgatatggggtagactacaagcctaccgtgcctcagccatgtgcagggcgacctgtccctggcatccacacctgtggcccatacgtcgcccgcattgtggggcgccgaaaacccaacacaactgaaacacaactgctgaccttccccctaagccgcctctaaacgaggtccctcggcccctggtcccagccgctctttgaagacttgcctgatgacaggcatgtaccatgtttttggctgggacatttttctgagccttgctccgggctccgtaaagcggacacggtgccagggagagaatttcggggcggttgcgggcacaggcgggcttctgcggaggccctggcgaacgcccccgcgcggcgcggtccgatggccccatggggccgcccctccactgtgaggtcaccggggttcagcaacattcactgcggctaggacgcgtacaggtcactgaggcagaacttcccgattctcgcgccttcgttcgtttctgcggaccagcggagactcctccacaccgcccaccgcccaatgatcccactgccgcaaaccgccccaaagccagcgccgaaagccgacgccggaagccccgccccacgcagggcccgcccgaacgttcccgttcctgggccgccattggccaagtctgaacggccccacgtcgaggctccttatgggaaatgtagttcacgtcccgcttcaggagctagcggcgccctcccttatcgccttggcaacgacccagccgcgccgcgaggagagccgggaatggaggtcgtggcgtgaggggcgccgagcgaggggaggcgcgggccacgggagttccgggagttccggcgttgcccggcagtccgcagtcctcggcgggaaggctgtcccggcgcctcaggcagctctgcgtgggccggggtgacttcctcgcgatcccctgcgcgaggtgaagggcagggacctttgccgcgccttccacgcgccgtgccccaccggcgagtggctccatcttcctcagacttatcgctcgcggacaggcgccgtgggtctcccgggcctccgtaccgtcctccttcccagcggctccgggaagcggttccctgtcttcggacgcatttcacccgcgcggggagagcttcccgggaaggttccacggcggccgagggtttccgcgcccgggacgcgtttcggctgaggccgtgggtccagtccacgggttctgcccgcacggtccaatggccggggaggcggaggtgagcagaggatgcctccgaggaatgagggggcccaccaggtggggggcggcgtgtgccagggcagagttggaggagggcaggagatctgcgtatgattccagggggaggtctttgatgcacggctggggcatgcccttggcagtgggagccattggagatgtgccgcaggactgggacaggatggggtcgtagttgctgtgccaggccctctggagacgcatgtgcagaacggcgtgtggaaggccaggcaattgcctatagggtaaactggggacgttgtgctgggggtgtacagttttaggcattctgttgtccagttttgtgcctgttgagcaggaggcaaactggaccctgggaccaggtacttgagacctaagggagaaggatgagcataggtttggttgcgtctgagaggtatgatctctgggactggaattggcaggcaggagatagagtggagcctgtgcccttggccctgcacatagatggcatcagtctggtcaccaacctgatgtcgctttgggctggacacagtttccagtagtaacaccagaagcatcaataacaccagcagctctgatattcctctgggataggagaaggaaggtataagggtatgtgtagggagtaaggtggggaagagtttagagctcatagggaaagataatgtcagggggagatgtgataggaccctgagatacaggtcaagggcctgaatgtgtccatctgtccatattttggttgtttttttctgcccatcattgaccccaaggctcagttggacccatcattgcagggcttggtgatgtttgaggatgtgacggtatatttctccagggaggagtgggggctccttaatgtgacccagaagggcctataccgggatgtgatgctggagaactttgcactcgttagctcactgggtaagtctcttacactgtcccccagcacactgactaccccctcattttccccatgcgaagttctgtccataacgaagccagaccatgggggctctttccttcccagattccctgttgtaggtattgtgggtggtgggactcggtggtgggactcggcggtgtgctctttccctgcctttctctgagcaatgctgttggcagcctcaacacctcttgccccaggagctagtggagcaggttttgggggtcagatgtttcatagtttgcccaccaaatcccaccaagctctgccttttcctggccatgtgactctcttgaagacatggcttctctgtgctctgggttttgcctccctacaaaagaaattttacagggacctccctgggccaggcttgagccatgaattttaatcagaacggtttgggaaatatatatatatatatatatatatatatatatatatatatgtgtatatatatatgtatatatatgtatatatatgtatatatatgtatatatatgtgtatatatgtgtatatatgtgtatatatatgtgtatatatgtgtatatatgtatatatgtgtatatatatgtatatatgtatatatatatgtatatatgtgtatatatatatgtatatatatatatgtgtgtatatatatatatatatgtatatatatatataatttttttttttttttttttttttttttttttgagacagagcctcactctgttgcccaggctggagtgcagtggcgcaatctcggctcaccacaacctctgcctccagggttcaagcgattctcctgcctcagtctcccgagtagctgggactacaggctcgcgccaccatgcctggctaatttttgtatttttagtagagacagggtttcactttgttggccaggctggtcttgaactccggacctcatgatctgcctgccttggcctctcaaagtgctgggattacaggcgtgagccactgcgcctggccacaaaggtacttctttcgttaaatttattcctaagtactttattcttcactgttaagtatggtgttagctgttggttttttgcagatgcccatttcaggtgaggaagttcccttctctttctagttcatttaatgtgtttattaagaaaagtcatggccaggtgcagtggctcatgcctgtaatttcagcattttgggagggcgaggcaggtggattacctgaggtcaggagttcaagaccagcgtggtcaacatggtgaaaccccatctctactaaaaatagaaaactagccaggtgtggtggcacatgcctgtaatcccagctactagggaagctgaggcaggagaatcgcttgaacctgggaggtggaggttgcagtgagctgagatcgcaccattgcactccagcctgggcaacaagagtgaaactacgtctcaaaaaaaaaaaagaaaagaaaggtcactagattttgtcaaatgcttttccaatgtctaatgaaatgatcatgtgatttttgtcctctcttctgttaatgtagtatattagaataattgattgccttttctttttttgagacggagtcttgttctgtcgccaggctggagtgcagtggcgcgatctcggctcactgcaacctccacctcccgggttcaagtgattttcctgcctcagcctcccaagtagctgggactataggcgtgcaccaccacgcccagctaatttttgtatttttcgtagagatggggtttcaccatgtttgcaaggatggtcttgatctcttgacctcgtgatctgcccccgtcggcctcccaacactaattgttgattttcatatgttcaaccttgcattactgggataaattccctgtcatggcttataatacttgtttttttttttttttttttttttagacagagtcttactctgtcgcccaggctggagttcagtggcatgatctcggctcattgcaacctccacctcttgggttcaagtgattctcctgcccccgcctcctgagtagctgggttacaggcatgcaccactatgcctggctaatttttttatttttagtagagacaggggtttcaccatgttggccagggtggtctttttttttttttttttttttgagacggagtctcgctctgtcgcccaggccggactgcggactgcagtggcgcaatctcgactcactgcaagctccgcttcccgggttcacgccattctcctgcctcagcctcccgagtagctgggactacaggcgcccgccaccgcgcccggctaattttttgtatttttagtagagacggggtttcaccttgttagccaggatggtctcaatctcctgacctcatgatccactcgcctcggcctcccaaagtgctgggattacaggcgtgagccaccacgcccggcctggccagggtggtcttgaactcccgacctcaggtgatccacccatctcggcctccaaagtgctgagattacaggtgtgagccaccacacccagccagtggtgtagttttcttataatgtctctgtattgagtatgagggtaattttggcctcaatggatgagttgggaatgtttccttctcttctgttttctggaagagtttcttaagtattggtgttaattcttatttcagtattgttagtattcacctttgaagccatcagggcttggggttgtgtgtgttttggggggaatgttttttaataacaacaagaaaaccctctttgttacatttgtatttagattttctgtttcttcttgactcagttttgatagtttgtgtctacttgggaatttgtccatttcatctaagttatccaatttgttggcatacatttgtacatagtatttcattattttttaatttttataaggttactagtgatgtcctttttccattcctgttcaaagtagtattgagtcttctctctgttttttgtcactctaggtaaacatttgccaattttgttgattttttcaaagaaccaaattttggtttgtcggttctctttttctaatctgtttcattcgtttctgctctaatttttattatttccctccttttgctatctttgggtttgtttttctttttcttgttccttgaggtataaagttaggttattggtttgagatcttttaaaatatgggtatttatagccataatgttcctgctaagctctgcattttctgcatcccataattttttgtttgttgtggtatttttttctttttctttttctttttttttaatttttctttttgagatggagtcctgttgcccacgctggaatgcaatggtgcgatctcggctcaatgcaatctccacctcctgggttcaagcaattctgctgcctcagcctcccaagtcgctgggattacaggcatgtgccaccatgcctggctaatttttttttttttttgaggtggagtctgatgcctcccaggctggagtgcagtggtgcgatcttggctcactgcaacctccgccccccaagttcaagcgattctcctgcctcagcctcccgagtggcatggtccaccacacctggctaatttttgtattttttttttttggtagagacagggtttcgccatgttggccaggctggtcttgaactccagaccacaggtgatccacccacctcagcctaccaaagtgctgggattacaggcgtgagccaccacccggcctgttgtatttttcttttcttttctttttttctttttttgagatggagtcttgctctgtcacccaggctggagtgcagtggcactatctcggctcactgcaagctccgcctcctggattcatgccattctcctgcctcagcctcccgagtatctgggattacaggcgcccaccaccacgcctggctaatttttttttgtatttttagtagagacggggcttcactgtgttcggcaggatggtctcaaactcctgaccttgtgatccacctgcctcggcctcccaaagtgctgggattacacttgagccaccacacccagccctgtgtttttattttcattcctcccaaagtacttgtaattgtcatgtgatttattttttctttgactctggatttttaggaatgttttgtttaaattccttaaatttgtgagtttcctaaatttctttctgttgttgatttctgttttaattcatttgtggacagagaacatacttgacattatttcaatcctttgaaatctactgaggcttgctttatttatttatttatttattttgagacagagtcttgctctgtcgcccaggctggagtgcagtggcgcgatctcagctcactgcaagctctgcctcctgggttcacgccattctcctgcctcagcctcctgagtagctgggactacaggcgcctgccaccatgcccgggtaattttttttttgtatttttagtagagatggggtttcactgtgttagccaggatggtcttgatctcctgacctcatgatctgcccgtctcggcctcccaaagtgctgggattacaggcatgagccaccgcgcccagccgaggcttattttatatcctagcaaatggtatgttctgaagaccgttccatgtgcacgtgacaatgtatatcctgctgttgttaggtggcaagctctatagatgtctgttaggactagttggttttcattgttgttcaagtctgctgttgttattgatggtgggaaattacaatcgttattattgctgaacagtctgtttcttcagttatgtcagttttgcttcatagaaaggcttttttttttctttttgtttgtttgtttgtgtttttgagacagagtctcgcactgtcgcccaggctggagtgcagtggtgtgatctcagctcactgcaagctctgcctcccaggttcatgccattctcctgcctaagcctcccgagtagctgggactacaggtgcccgtcaccacatccgcctgatttttttgtatttttagtagaaggggggtttcaccgtgttagccaggatagtcttgatctcctgacctcgtgatccgcccaccttggcctcccaaagtgctgggattacaggcgtgagccactgcgcccggcctgtttgtttgtttttgagacagggtctcactctgttgcccaggctagagtccaatggtgtgatcgtgactcactgacgctttgacctcctaggctcaagtgatcctctcactatggcctccctagtaactgggactacaggtggtgcatgccatcatgcctggctaattaaaataatatattttttgtagagttggggtcttactgtgttgcccaggctggttgcgaacgtctgggtttaagtgatctcctacctcactttccaaagtgctgggattacaggcatcagccaccatgcccagcctgtttcttttactacctgtcacccgcaggacttgcaccttcgagatcccctgtgtttacccagctggaggatgatgaacagtcgtgggtgcccagctgggtggatgtgactccagtcagcagagcagaagccaggagaggttttggtcttggtaagtggagtggaggggaataccttggtttcagcagtgggctcacagaatgctgagtacctgcatacaccgataccttggtgttgagggcagtgaccataccttatttccttccacctttcctgtcttatgtggacactgtgcagtctgccatctctaccatgattttcaggccccgcatgttcctgcctctctggcctgcgtctcctcattgcccttctctgtatctgtgcagagctgtctactgttggcgactcagtgcgtgtcttgaaatgtgcacatatccttaaacaggtatttgaacttcagccaatccttaattaatacttaaacaccagctactattttggaatcacattttgctgggactagacacatgcctcctcatagtgcttggctgtcaccagcagccaaggccctgctgaaaccctttgcagaggagtgacttggagaccccacctctcttccctgcaccatatcctatcttgtgccctcatctcagttgaggttttccttagtctgtagtctggtggagccatattcagttgtgccaggctttcccaacccagacctttcctagcaacctctcagcaattcttttttttttaagatggagttttgctcttattgcccaggctggagtgcagtggcgcaatctcagctcactgcaacctctgcctcctgggttcatgccattctcctgcctcagcctcttgagtagctgggactacaggcgcctgccaccatgcctggctaatttttttttttttttttgagtcggagttttgctcttactgcccaggctggagtgcagtggcgcgatctcagctcactgcagcctctgcctctggattcaagtgatcctcctgcctcagcctcccgagtagctgggattacaggcatgcatcaccacacccggctaattttgtatttttagaagagatggggtttcgtcgtgttggtcaggctggtctcgaactcctgacctcacgtgatctgcccgccttggcctcccaaagcactgggattacaggcgtgagccaccacgcctggccctttcagcagttctatggagtccttctgggtgtgtctgacatgcactggtgattaaggtacctcctccctctagttcaactcttagtaatgattcatctctgctttcagatggtttgtgtagagtggaggatgagagagcccatcctgagcatctaaagagctacagagtcatccagcaccaggacactcatagtgaggggaaaccaagaaggcacactgagcatggggcagctttcccacctggttccagttgtgggcaacagcaagaagtccatgtggcagagaagctgttcaaatgcagtgactgtgggaaggtgttcttaaaggcctttgccctccttgaccatctgataacgcattctgaagagagacccttcagatgcccaacaggcagaagtgctttcaagaagtcagctcatattaacccccgaaaaattcacactggagaaacagcccatgtgtgtaatgaatgtgggaaggccttcagttacccgtctaagctgaggaaacaccagaaggttcacacaggcataaaaccttttaagtgtagtgactgtggtaaaaccttcaaccgcaaagacgcacttgttctacaccagaggattcacactggagaaaggccttacgagtgcagcaaatgtggtaaaaccttcagtgttctgtctaccctcattcggcaccggaaagtgcacattggagaaaggccctatgagtgtacagaatgtgggaagttctttaaatacaataatagcttcattcttcaccagagagttcacactggagaaaggccttttgaatgcaagcaatgtgggaaaggctacgtgacccgttcaggcctctatcagcactggaaagtccacactggggaacggccctatgaatgtagcctgtgtgggaaaaccttcactaccagatcctaccgcaatcggcaccagcagttccacactgaagagaggtcttatgaatgtacagagtgtgggaaggccttcaaacatagttccaccctccttcagcacaagaaagtccatactccagaaaggcgtcaggaggacagggcacatgggaaggtcgttagctgctagcaccgtgttcatcaggaaaggtcttattccagaaaggaggttaaggagagtggccgtgagagtgccatccgaaagaagctaaaccttgcacatcccaacacccaccccagggagagttcccgtgtgtgcctggtgtgtgggacgctttcgggagccacattgcactctgacttgcctggggctgttggcagtgtcacatcactgagtttatccaccgccatccacctctatccaccccataaggtccctacagcaagtgggacagcagaccttgtgctccttgctctaaacagtagagaatcgttaatagtggagcccaaaacaggcctcattccctacccttgactggtttagctgtggacatgacccacctctggccggaggagctgagctggtatctgctgggggcttcctgggaaggtttaccattttcatggaaatggttgacattacacatggtatttgtcatgccctagcatggactgtctcatactgctctggactatgtggtaataaaggctttattgtttaagccgcttaaaattttttttttattttttttttgagatggtcttattctgttgcccaggctggaatgcagtggtgccatcatagctcaccacagccttgaactgctggtctcaagggatcttcctgcttcagcctcctgagtagctggcactacaggtgtgcgccatcacacctggctaatttttttttttcatttgtggacagggtcttgctatattgcccaagctggtctcgaactctgagcctcaagctatcctcctgccttggcctcccaaagtgctgggagccactgtgcctggcctagtttttttagagacagggtctcacagtcttgcccaggctggagtgcagtagtgtgaagctagctcattgcagacttgaactactggactcaagtgatcctcctgcttcagcgtattgaatagctaggattgtacttgtgtggcaccacatctgactaattttaaaaatttgtatagagacaggatcttgctacattgcccaggctggtcatgaactctttgcctcaagcagtcctcttgcctcagccttccaaagtgctggtattatagttgtgagccactgtgccctgccaagtctcttttaatattgaggttctgatccctgtgtgtggagagattgagaatagaatccggcactatcaccgtaagttgagggaatggcttttgtggaggtggtctcttgagttttttctgcctcagtggggatggcaggatgacagaaaatacctctagtcaaggttggcctaatttgtattggcccctgagtcctccagggaaagacttgtagcctggatgtcaggcttttttgtgggtccagagctcaccttgcggaagggaatagttggtgagagatcttctatatgtttatggacataaaaagttgggttccttgttcccagggaatgttccagaacttccagcattggtcagaaggagctgtttccagattcagctcaaaagtcatattctccaaaatctggaacatggaggtaagttatagactgactctaagacctataggggcctgttgggtagagtaatttgagtagagtaagtgggcatagaaatattgagtgaagtagtatggagtgaagtgtctgataaacaagaggatttcagccagttctaaagaggcatccacaaatgttccagcaactgaggtttcctggggtgagggcaccagaacttctcagcaattgcagacctgttatttgtgtcaaggtcactgtcagcaaataatctacagactttctggattctcatatcctctctgggctgttcacctctcatggccattatcctgagactgaaagattctatagtcctgggatgtgccttttgtgacccagccagtactcctggtgtctggatgctgtggcctttgcagttgtcaagtttttgctgtcatggtgtcagggctttccctctggggctcaagagagacacgtagggtaaccaaagtatggatccagatcttgcggtttatgggaccttttcagagtcttgctgtgtcacgcagcctggagtgtagtggtatgatcacggctcactgcacccttgactccagggattcaagtgatccttctacctcagcctcctgagtagcagcgactacagttacacaccaccacactcagctaattaaagaaaaaatcgttttaggctgggcgtggtggtcgatgcatgtaatcctagcactttgggaggccaaggtgggcagatcactttaggtcaggagtttgaaaccagcctggccaacatggtgaaactccacctctactaaaaatacaaaaaaattggctgggtgcagtggctcacgcctgtaatcccagcactttgggaggccgaggcaggtggatcatgaggtcaggagatcgagaccattctggctaacatggtgaaaccccgtctctactaaaaatacaaaaaaattagcccggcatggtgacgggcgcctgtagtcccagctacttgggaggctgaggcaggagaattgcttgaactggggaggcagaggttgcagtgagccaagatctcaccactattctccagcctgggtgacaaagcaagactctgtctcaaaaaaaaaaaaaaatttgggagtagggggtcaggattggcggctcatgcctgtaatgccagcactctgggatactgaggtgggaggatcgcttgagccgagaagttcatagaccagcctgggcaacatggcaagaccccatctctttaaattttttttttttttaagagacaaggttttgccatgtgcccaggctgatcttgaactcttgggctcaagtgatcttccagcctcagactcccaatgtgctggggttggtgtgacactgttcctggcttatacccacttttattttattttattttttttgagatggagtcactctgttgtccaggctggagtgcagtggtgtgatctcagcacactgcaacctccgcctcccagggtcaagtgattctcatacctcagtctcccgagtagctgggattataggcatcggccagcatgcccggctaatttgtatttttagtagagacggggtttcaccatgctggccaggctggtctcgaactcctgaccttgtgatctgcccacctcagcctttcaaagtgctgggattaccggcgtgagccaccgcacccagcctatatacccacttttaaagacatacgagatgctaaatgttattcagaatgggctagaaaatgggtggtaacttccagctgttgccatgctaaggggcagtaacttccgagtgttgccaaggcagtggcaaactgccatggcaatggcgggcctgtcttacggggaagtgctttcagcgccttttcctgatttcagcgtcttcaacctgctctggagtagagtcccatctgcctcctacctcagcttcacaaaaatcccttgaaggaggaattatcttcattttccattgctcccccacttccccagactggctgctggataggatattgatcaccttgctgcctatagaaatctcagtgctgcttttttagggggaacggaagccaatccacattgtaatttttttttcttttgagacggagtctccccgtcacccaggctggagtgcagtggtgcagtcttggctcccaggttcaagtgattctcctgcctcagcctcctgagtagctgggattaacaggttcgccgcaccatgcccggctaatttttgtatttttagtagagacagcgtttcaccatgttggtcgggctggtctcgaacccctgacctcgtgatccgcccacctcggcctcccaaagtgctgtgattacaggcgtgagccaccgtgcccagccatgtaattttaaaaatgtaatttataagagcataaaattatgaaatacttagaaataaatttgacaaaattatgcaagacttgtacactgaaaactacaaaatgttgctgagagactgattgaagaatacctaagtaaatgaggacatttaccatgttcatgaactggaagtctcaatattagtatgttaatcctcccaaagttgatttgcagattcaatgcagtcccaataaaaatgtcactaggttttgttgttgttgtttttgactcgctctgtaacccaggctggagtgcagtggtgcaatcttttctcactgcaacctccgcgtcccgggttcaagcgattcgcctgcctcagccccccaagtagctgggactacaggtgtgtgccaccacgcctggctaatttttgtatttttagtagagacagggtttgctatgttggctaggctggtctcaaactcctaacctcaagtaatctgcccctcttaccctcctaacatgctgggattacaggcatgagcagttgatcaaattcaacatcccgtcatggcagaaactctcaactaggcgtagaaggaacatacctcaacataataatggccatatatgacagacccacagctaacatcttactgaatggggaaaggctgaaagctttttctctcagaactggaacaagacaaagatgcccactttcaccactcctattcaacatagtactagatgtcctagccaggcaagagaaaagaaaaggtatccaaattggaggagactaagtaagttgttcctgtttgcagatgacatgatcttatatttagaaaaacctagaccccaccaaaaaaactcttaggtctgataaagagattcagcaaggtttcaggatacaatcaatgtacaaaaatcagtagtgtttctatacaccagtaatgatctagctgaaaaagaaatcaagaaggcaatcccatttatgatagttaccaaaatatacctgggaataaatttaaccaaggaggtgaaacacctctacaaggaaaattacagaacattgataatagaattgaagagacctttggattcatcctcacattcttcctcttctgcccacaaataacccccttccaaaaaaaaaatgatacaaacaaatggaaaaacatatgctcatggattaggagaattaatatattttgttttgtttttgtttgttttgagacagagtctcgctctgttgcccaggctggagtgcaatggcacgatctgggctcactacaagctccgcctcccgggttcacaccattcttctgcctcggccttcccagcagctgggactacaggtgcacgccactatgctcagctaattttttgtatttttagtagagacagggtttcaccgtgttagccaggatggtctcgatctcctgaccttgtgatctgcctgcctcggcctcccaaagtgctgggattacaagcgtgaaccaccacacccggctgttttttttgagacggagtcttgctctgtcgcccaggctggagtgcagtggcgcgatctcggctcactgcaagctctgcctcccggggttctcgccattctcctgcctcagcctccagagtagctgggactgttggcatgtgccaccacgcctggctaattttttgtatctttagtagagacaggttttcaccatgttggccaggctggtctcaaactcctgacctcgtgatctgcccagcttggcctcccaaagtgctgggattgcaggcatgagccactgcgcctggcagaagaattaatattgttaaaatgaccatactgcccaaagcaagctacagattcaatgcaatccctatgaagatatcaaatgcattttttccccacagaattagaaaaagttctcagagctttgtagaatcaaaaaagagcccaagtagccaaagcaatcctgagcacaaagagcaaagctggaagcatcacactacctgacttgaaaatatattacaaggctatagtgaccaaaagagtgtggtattggtataatagtcacatagaccacggaaacataatggagacccagaaataaatccagatatttacagccaactgattttcaacaaagatgccaataacatacattgggaaaggataccctcttcaataaatccaaaaactagatatccatatgaatgaaactagacccccatctctcaccgtatacaaaaacaactctaaataaagacttaaacatatgactcaaaactgtaaaactactagaaaaacaagggggtcggggcagtggctcacacctgtaatcccagcactttgggaggccgaggcggacggatcaccagaggtcaggagttcgagaccagcttgactcacatggtgaaaccccatctctactaaaaatacaaaaaaaaaaaaaattagccaggtgtggtggcgcatggctgtaatctcagctacttgggaggctaaggcaggagaatagcttgaacccaggaggcggaggttgcagtgagctgagatcgcaccattgcactccagcctgggcaacaagagtgaaactcagtctcaaaagaacaaaataaaacaaacaacaacaacaacaacaaaggaaaaggaaaagcacgtgttgggagaaaatatttgctaaatatattcgacatcttttatctcaaatatataaataacacttataactcgattataagttaataatcatccaaagtttaaaatgggcaaaagatctgaacaaatatgctttgaaagaagatatatggttatcaaatacacacttgaaaagttgttcaacgtcactagtcattcaggaaatgcaaatttaaactatgatgagatacaactactacacatttattagaatcgttaaaatgaaaaagacaaacatacaaatatatggcaagaatgtggagcaactagaactctcagtgagttctaatataagtgtgataaatttttttgaaaacagtttgacagttcttaaaatgttaaacataaaagccgggtatggtggagtgcacctgtagtcccagctacattgggcaggaggatcttttgagcccaagagtccaagtccagcctgggcaacatagccagaccctgtctcaaaataaaaacaaaaacaaaacaaaacaattaaacatacacctaccatatacccccaaaattccacttctaagtatctacccaagagaattcaaaggatatattaacacaaggacttgtacacaaatgtttatagcagcttcatttgagatagtcaaaagttagaaacaatttggccaggcactgtggctcatggctgtaatcccaccactttgggaggccgaggcgggtggatcatgaggtcaggagtttgaaaccagcattgccaacgtaatgaaacctgtctctactaaaaatacaaaaaaaatcagccaggcgtggcggtgcacacctgtagtcccagctactcaggaggctgaggcaggggaattgcttgaacccaggaggtggagcttgccgtgagccgaaattgcgccactgcactccagcctgggcgacagagccagactccatctcaaaaaaaaaaaaaagatggggtcttgctctattgcccaggctggtcttaaactccccggctcaagtgatcctcctgccttggcctaccaaagtgctgggattacaggcgtgagccatcacgcccgactgaacctcttttccttataaactatctagacttagatttttccttccttccttccttcctgtcttccttcttccttccttccttctttccttttttttttttttttagacagaattctgctcttgtggcccaggctggagtgcaatgccgtgatcttggctcattgcaacctctgcctgccgggttcaagcaactctcctacctcagcctcccgagtaactgggattacagccgccaccaccacgcctggctaattttttgtatttttaatagaaacgccgtttcaccatgttggccaggctggtctcaaactcccaacctcaggtgatctgcctgcctgggcctcccaaagtgctgggattacaggcatgagccaccatgcccagcctgagatatttctttatagtaacacaaaaacagcctaacaaaaaggtcacatagtaggtaggatttagtaagaaagagagctgagatttcaaggcaggtgaactgggtctaatgtttccactgctttactcacctctccctacctctagatttccaccctcccatgttgaaatctcttggttataaattttcacttgtgcttctttcttagatcaccttcttgaatcacagtggtgtctattttcatatccattgagggtatagtgattccttgagggttacaaggtctgcagatcgatgagttcttggcattttggagaggccagagactggtagctctgagtcattagttgtcaggccatgcctccccatcaaacaatcgaagcttggctgacttctctgagtgccagaagaaggctggggctgggggtagaggatctgggtttcacaagaggcgagtctggaaatgtcaaaattggggtccaaggtgagaggatggcgtggtaggacaacattgtctgccatccgtgtataatggctgaagctctggttagtgggtgtggcctaaggagaatgtagtgattcccactgtcggtgtaaagggcttcatattgatggagagttttctgtgttgtcagaagttctggtggacactgtgagacagatttcatggatttatagatgagacagctgaagcttgggagtctgtgccccagatcgcacaatttattagcagtaggagtccaagttgagccaagccagagaaggttactgagtgttttggcacccttggccttaatctgctgctcttcagatttcacagcccccatgttccagatagttcactcaaagcttgggagttggagatgagggaatcaacagatgctgacactagcatgaaggagaggtatagctgatctggaggtatgattgggagaggttgagaagcctttcaagggtgtccctgatgtgggagggcacaagcaaaggcccaggggcaaggaactgcccagtagattccagaagagaactaccattgcatacagcagagtgtacaataacagggtagtcagtacactgcatcaaggggctgaaggcaactgccttttggtttgagcatagtctgaaagcagtggagccactgaatcccacaaaagctggtaacctggacagctcaaaagtcacagccatcaggactttgcctggaatattctggcattattggcaaacatctatcttcccctaacaggttggctgctgtatactgagacccagtcggagatcagaaggcaggttcagtagaaacacgtaggactctactcatgtattaggaatcttttttttttccttttttatttttattttttattatttttttgagacggagtttcactcttgttgcccaggctggagtgcaatggcgtgatctcagctcactgcaacctctgcctcccaggctcaagcaattctcctgcctcctgagtagctgggattacacgcatgcgccaccatgcctggcttttttctttctttctttctttctttctttctttctttctttctttctttctttctctttcctttctttctttctttctttctttctttctttctttctttctttctttctttctttccttccttccttccttccttccttccttccttccttcctttcctttcccttccttccttccttccttccttccttccttccttccttcctttctttctttttctttctttctttctttctttcttttcttgtagagatgggatttctccatgttggtcaggctggtctcaaagtcccaacctcaggtgatccgcccgcattggcctcccaaagtgctgggattacatgcgtgagctaccgcgcccagccttttttttttcctgttttagagacaaggtctcattatgttgcccaggctggagtgcagtggtgcaaacatagctcactgcagtcttgaactcctgggatccagtgatcctcctgcctcaagtagctggaaacaggcatgccacaatcatgcccagcaccatcttatgagatctaatcttggccactcacacagaggattgagctctgatgacgtgtctaccctaactttatttgcttagaaggctgagccccatatggctcagctaacctttaattctgatcccacatgtgtcttacatattggagacattagcatcttccatattggagacattacactcaggaaggaaggcctgagtagggtaggtatcccccagacacctcactgtgctggggagtatttgagaagccctgctgtaaactttgctgacggcaaaactgttgtggcttctgctcacaatgtggttatcattgtccatcccctcaggggcttccaggagacgtggcagctgcagtggcctctgatccatcatacagtatggatggacaccacaggccaaagattctcatgtcagaggatttccggtcttttctcccctaggcctcaggaggacccagggaaatatctaaagccaacctatagttttggtgaactgagtttgcattgaaatgtttttggaaatgattttcaacatttataaaatcacatgccacatagaaatctgaatatttggctcttcttggaaaaccaggagatatgggaaatctgtactgactccaccatattgtctccccaccccttaagagggacagacctgcttggtggccaccagaagtggaattatgaaggccacggccatatgattctcaagaaaccctggctactcacataagccactccagaccatgatttctgtcttctctgtcttgaggtgcctacctgtgcagtgatggccatgagatgaacagcccagggagtccacaggaaatccacaaaatatttatttgaatttcagttatgagtgacacataggtctgcatgtcctgagaagttctgtacacccttatctcacttggccatagtcattggaagtttctgatgtgcgtttagaacagacatgtcccctcttgtctaccacagtcttctccacacttagagtttttgtaccaatgatagttcccacatagccctggcaggtctgaaccagttatgcctgcctactgagttttatatttcatgagtcatgagccatgggcaggtactgggggatgtagctggtaaagtgggacatgcattgggaacagaggaccaaacttttgctgtggaggttctcaaagaaactaccccattcttcagagctagctctgggcccacaggtgacccttggtgtccagatcacaagattcagtccaagcctgtcagtctttcataggaggccttagggcaacaagacaaattcaaccaaaactggactgagcactcttcctgcccatgcggctgtttgagacactcagtgcccccttacaaaagctgttctttttatattaggatgaattgtttcaaaccacctcaccaactctgatgcaggtggctaaacattaaggcctttgttatctcagagagagacaggcagatccaggagtgagtgattgagactaaacagatcattcctaagtgtcacatgtagatgcaaacaatgtccatgaagagaaaccttttcttctattttagatggagtctcacactgtcgcccaggctggagtgcagtggcacgatctcggctcactgcacaccctgcctcccaggttcacaccattctcctgcctcagcctcctaagtagctgggactacaggcacccgccaccacacctggctaattttttgtatttttagtagaggtgggttttcaccatgttagccaggatggtctcgatctcctgacctcatgatctgcctgcctcagcttcccaaagtgctgggattataggcatgagccactgtgcccggccaagaaaccttttctggaaagctccagaagacaccagctcagatcttagcaagaattgtcataccaaaatctaaagccatcagtgggaaagaaaatgaaggtactcaaagcctatgtaattctctctagagaatggaaaagggagtatagtctgctttcccttagcacagtgagggagactgatacatatcatgagatcttgccaggtggcagagatgagacagtatggcaggcagctttggacatggcttccaatgatctctgccctctggtattcatgctcttgtgtaatgctctccccttgactgtgggctggaccaagtgacttgcttctaactaaatttagcaaagatgatgggatctcacttctgttattaggttacaaatgactgacttgttggtattctccactgcatgatcagcttgcaagctttgattgacaagctgccattttggagaggcccatgtggcagagaactggaggaggtctcagaccaacagacgggtcctcagtccagcagcccacaaaaaactgaatgctgccaattacatgagtttgcttggaagcagagccttccctagtcaagccttcagatgatacacccccagctgacatcttgatgttagccttgtgagaaaccctaaagaggagtcagctagctgcaccaaagttcctgacctatagagactgtgaaatagtgactattgttttaagccactaggttttgagtaatttgttacacagcaataggtaactaatacagatggcttctgcaatagcagtaatacagtgccgcctaagattctgggagctgtggctttcccacatttgttgcccataactctcttgtgaattctctggtgatttttcttaaaagggggtgtctatagctgaaggctttcccattttcactgcatttgtaatgcctttttcccataggtactttatatagctttctcacataggagaggtgactgaagaccatcccacattccttagatgcaggggttttctctactgtgaattttttggttatagataagaatcgatttcttcttgagggtctttcttcataccaagtatttaaagatctctcttcagtgtgggttcttaggtggttgaagagggcaaaagtcttcatgtcttcccatagccactgctcttgaagggcttctccctatcatggcctgcccggtgttatctgatgttagagctgtgtggcagcatcttctcactcagctcttcttcatggcttccctgtgccatgagtactctggtgatggagaaaggaaggcctttccacattctcttttgagcttctcattattctggtactccagtgctggaagggggtagttaccctggaaagccttcacaaatgcctggcccttgagtcctctcacttatgaattttgctgtgcatgaactgaaaagtgctcttactgtgagccatgtcacatctgaaaaggtggtcttcaccataaatggtctactgttggtgaaggtttgatccactcccttgtgtggggtttctacctggagtacactgcctaacgttcagccaggagtacaatctttggcagggcaagggtgccatggtcagggtgaggaacgaccagtcatggagtactggtcctgtcacatatcccactactgagcctgttaggtgacattcacataggcagggagaacagagagggatctaggacagatgtggaagcagcagtggctactgaaactgctgttcagtgatgtgagcccaggccacccttcttttctagagatggggccttgctatgttgccctggatggactcaacctcctgggctcaagagatcctcctgcctcagcctctcaagcagctaggactataggtgtgcaccactgcacctggccaggcctctcctttatggggactcctgttcacatcccagccaatgctctcatgagtacttccttgtatgggggaggtcaaagaaacagcagcagctcacatgtgatgatgctgaaattacatggtaaataagctttttaaaataggtgccggccaggtgcggtggctcatgcatgtaatcccagcactttgggagtccaaggcaggcagatcaggaggtcaggagatcgagaccatcctggctaacatggtgaaaacccgtctctactaaaaatacaaaaaaattagctgggtgtggtggcgggcaactgtagttccagctactcgggaggctgaggcaggagaatggcgtgagccatttaggaggtggagcttgccgtgagccaaaatcgcgccactgcactccagcttgggcgacagagcaagactccatatcaaaaaaaaaaggtgccaaacaccatattctacaaggttctggatctctagctccttctaaaataccagctctgtcaactgtgttaaatgcccccatctgcctgtgcccactctgttggccagcaagactgtgaaggcatgaagtgtgtgttagtgaccagaaaccctggccagactgcaaaaaccactttcctggacgtcaggctatcacttctctcagctcccagttcctacctggggagtgatgggtgccaagatacagtttgagagaggtgaagtgaatgtacatgacattgcatttatctgctttaactgtggcaaaaactttaacatggcaaatacaaaggtctgtagctctggagttgttctgcacaccctcaccctgcacagtcccagttgatggggaactatggctattcctttgtccatgatggcatgtgccctagttcaccagtctacccaaatccctggttattacctcacatccagtgtttctctatgcacatagagtcctccatggacccctctaggtctttgccttggtgaccctgtgactattttagtgttgtagatgagtttatttttcctctgggtaagctctgggccctacggtaactgaaacaggccactatgttcaatccagagcctttcagtctttcccagtctttcacacagcaatgcaaagtaggctacaacaggacagagcaactacccgctcttctactgtgcccttaggcagattttgtgcccccaaaaggcactccccaatctatccattcattttctcaacctaccccaacagaacccctaagattaaaggtgacctgatcaataaggtctttattatcaccagttagtgcaggcaaggtaggtgattccagtggagggtgatttgtggcctcaatggacacatcttaggggttaaacacagacttgaccacatccacaaggaatgtgcatcttcctgagctcaaattagatttccctcaaggcccctcaaccagcatcggttcagctgagcacagtcctgaatccctagagaacacaggaaggaaggctcagggtactgttttccccatgcatgaggacaggactgctgcaaatttttggatccaggcaagatggaaagtgactatggcttctgccttatgctgcatgggtgagatggccctgcaaaggttcctgggctggtcagaaacagagtagcttctgaaggcttttccacattagcagtacatgtaggtaatttttctggtatggggattctgctgcatgaagtttgacttggctgaagattttctcacaaagaccacttccataaggctccactcaggtatgaatctttttatgctgtgcaaggttacaaagatggctgaagagtttcccacactggctacactcataagtcctttctctggtgtgaactttctggtgccgaacaagtgtagatctttcactaaaggcttttccacactggatgcactcatagggcctttcttgtgtgtgaactctctgatgacgaaccaggtgggagttactgctaaaggctctcccacattcactgcattcgtaaggcctttctccagtgtgaactctccagtgacaaataaggctggattttcggctaaagaatttcccacattcactgcatttataaggcttttctccagtatgaactttctgatgcttaatgagaatggagttttggctaaagaatttcccacattcattgcactcataaggcctttcttttgtgtgaactctccagtgttcaatgagagtggagctgtgagcaaaggctttcccacactcactacactcgtaaggcttttctccagtgtgaattctccagtgctgaatcaggctggagctgcggctgaaggatttcctacattcgctgcactcataaggcctttgcccagtatgtactttctggtgctggatgagggtggagctattactgaaggctttaccacaatcacagcattcaaaaggccgttctccagtgtgaactttctgatgtcgaaggagatgggagctttggctgaagtctcttccacattcactgcactcaaaaggccgttctccggtgtgaactttctggtgctgagcaaggttggagttattgttaaaagctcttccacattcactgcattcatacggtctttctccagtgtgaactctccagtgctgaatgagagcagagcttcggctgaaggatttaccacattgactgcactcataaggtcttacctgtgtgtgaactttctgatgccgaaggaaattggagctttggctgaaggctcttccacatttcaggcactcaaaaggcctttctccagtgtgaactttctcatgccgaatgaggtgtgatctgttactgaaggctttcccacattcatcacactcataaggtctttctcctgagtgaattctctgatgatgaacaaatgtgagtttgtggttgaaggttttcccacatgcaatgcactcataatattttacttcagtgtgaaatttctggtgcttcctcagcttagatgagtgactaaaggccttcccacactccttacacacatggggtatttccccagtgtgaaactttttattaccaaggattgatttctcctctaagaaatttccacctgttgggcatgtaaatggtatctcttcagagtgagttctcagatggttggggagagtggagctcttcaggaaggcttttccacagttgctgcactcgaagagtttctgtgtggtacagacttctggaagctgcccaagattggaatatggcttctgcccactgtcaacagcttgaagctggaggaggtcacagctgcccaggatgaccttcccaccttccctgcaagtgaaggggttctctgacaggtggactttagagctcttcataagtgcgtccctgtccttgtaccatctaaagggcttccctccactgtgctccttctggtgctggtgaaggtttgcattcaaccaaaagtctctcccacatgctccacatgtgtagggtttctcctcagactgtgttccctgatgctcagccaggtgcaaaatgtctttcaagaatggcccacacatgtcacaggagttagctttcttggtggaaggatctgcattagggatcctgacctgtaacacttctacagaaacattctgcttgggatgggccccctcaccctctactccatgccaagaacctgaaagtagagaaatgccagttaactaagaattccacttggtgggaatggttgacttcattagaaatgttacccaggaattcacacccaagaagaggtcccagggattgctgacaggccaacagggccatcatcagggtgaagaagggcccattactattggcaggatagggaccagccaagcaacagaataagggagacctcaccaggggtaaggacacagaaatgggtcaaaggacttaaatagacatttctctaaaagaagatatatacacaaatggccaataagcatatgaaaagaagttcagcatccttaaacatgaggagtatgaaaaccaaaaccataatgagataccacttcacatccactagcatagctataataaaaaaaaataaatgacaacaaatgaagtagaaaaactggagcacttatacactgcagacagggatgtaaaatggtgcagccaatttggaaaacagtttggcaagtctgcttctacagagctacacaagagaactaaaaacatccacacaaaaatgtgtacaggactgttcatagcagaatttttttaaaatttgagatggggtcttgctatgttgcccaggttggtctcaaactcctgggctcaagtgatcctcctgcctcagcctcctgagtagacggattataggcaccttgcccagcttctatagcagcatttttttctaacacctaaaaaatggaaacaagccaaatgctcatccactggtaaatggataaacaaactgtagtctttctatacactggaatatttggctataaaaaagaatgaaatattgatacatgctacaacattgatgaacttcaaaaacatgctaagagaaagccagtcacagaaaaatacatagtattctataaaatgtctaggaaacgtaaatctatatagtcagaaagtagattagtggttgcctaggaccggggggaaagggataagggaacatggggagtgacagctaatgggactgctaataggacctacagtttctctttaggtgatgaaaacatgctaaaattacattatagcaatgattataccatgtgaaaacatatagaaatcactagactgtgtactttaaaaggtgaattgtatggtttatcttaataaagctgtttttaaaaaatatctcactgggggctgggcgtggtggctcacgcctgtaatcccagcactttgggaggctgaggtgggtggatcacgaggtcaggagattgagaccatcctggctaacatggtgaaaccccctctctactgaaaatacaaaaaaaattagctgggtgtggtggcaggcacctgtagtcccagctacttgggaggctgaggcaggagaatggcgtgaacctgggaggcagagcttgcagtaagctgagatcacgccactgcactccagcctgggggacagagcaagactccatctcaaaaaaaaaaaaaaaaaaaaaaaaaggaaaaaaaaatctcattgggaaagagacagaatctgggcatgacctcatactgggtaacccgaccagggattggtgaatctcagtgggatctgttaggcagactggaggtgtctgatccccaacctttgcctccacaaggctcctgggcaacagctattaggaaagctcatgaggctgctcagagagagacaggggaagtacacacagcagaacctcagcaccccagcacctacaacaggaaacccgagaaggaagcagtacccatgatctggctttgggatgaacagagctttctatggggaaaagacacaaggcataaggtagtcatcaccatgctgagacagggcattaccaagtgaggtcacaagctcaaggttttccagcatcacactgtggtacaggtgcctctgggctgcatcaaggagctcccactcctcttgggagaagtatacagccacatcttcaaaggttaccatgctcttcaatgtggggacagctgagccacagggccaagaagtatgctgacaaagaaacaaacaattggtcaaatggaaatatgcaggaccttgctgtgtgactcagaatcctgatacatctaccactaatatctctttttcttatgatcctctcagtccacccactactcacccatccacagcttatcttcttcctcagggcccccacctaacatgccctggaattaatggtgcccctctctcctagtagtcccactggtcactgtatccaggccaacccaacctagaggaacaataggcaggtgggcagatggatgcttcctcctccctcctgctggccaattttccttgtgtcttctggctcatacctcccaaacataagaaaatttgggcttccctttcttaagcctcttgtaccagggccatgggcccaatggttcacattctctcacctttacatgtcactcctcagaccatacagttcttatatttccaacccctccctgttcacactgtaggcattctccctagcatctcaccatgcacatggcatacctgacagatgcaaccgggatccattcctggtccaagccagctacagagctccaaaaaccccactgcaagaggcagtcatagcccctcaagtcaatgcctcccctgccagccctgttccttcaaccatcagctgcccagaaccataagcagatctcaaatatctcttccctctgatatctttgcctttgtatgtgttgtctcctccccagtcatagctgtccttgctcttcctaacactcaaatccaagatccactggcccccaccttggcttggggactcagcttaggctgaccctttctgatcttgccactccaccagcctgacaaaaaccccaggaccctatttaagaagagataacatgccctgaccacaagaaggatggccgcaacaatgtagtgagctgtagagaagcaaatcaacctaaaccaaagcccaactctcatcctacttttgccgctatgcttcactgttgtcctagacctactctctgctcaggaggctcagccactatcttgaacccaacccacaactgcatgcagtgtccacacacaagcatccatcccttggatgtttccagcctaaacccgacataatttcataatcacatgtttagtggtctacttggcacctcaatttggtagtgtctgggacatctcaaatacaacatggccaaaatccaactctttatcttccccctgaaatctactcctcacaccaacttccacatctgaaagatctaaggtcaatttttttttttttttttttgagacagagtctcgctctgtcacccaggttggagtgcagtggcgcgatcttggctcactgcaagctccgcctcccgggttcaagccattctcctgcctcagcctcccgagtagctgggactacaggcacccaccaccacgcctgactaattttttgtatttttagtagagatggggtttcaccgtgttagccaggatggtctcaatctcctgacctagtgatccacctgcctcggcctcccaaagtgctgggattacaggcgtgagccaccacgcccggcaatttttttttttttttaagacagagtctcgctctgtcactcaggctggagcgcagtggcacgatctcagctcaatgcaacctccatctcccagattcaaacagttcttctgcctcagtttcccaagttgctgggattacaggtgcacactaccatgtcctggctaatttttctgtatttttagtagaggtggggtttcgccacgttggccaggctggtcttgaactcctgacctcaagtgatctggccgccttggcctcccaaagtgctgggattacaagtgtgagccactgcactcagccttaggtcaatcttaacatttcactttctttcactgtcccacatcaggtaatccatggcccagtttgggcagattcagaagccaaccatctgtcctacctccacgggcacccctctgtccagctacccaaagcacacatctggaccacatctgtcagctcctcactggccttcctgctccaccatcaccatccctccagtctgctgcccactaggcatccatagggcgtctgttaagactggagtcagagcacctacttcctctactccaaaccttccatggctcccaccaccatcagaatagaggtccagctcctcaggctgccattccaggcctaactattggtttcccttccctgtttccaccagactaaatggagaccggcagtccccagaatgcttccatttcatcaccactaaacaaggtacacatgctggtcactgtccctgggacagccttccagatctcattccacaggattccagaaatgggaatccctcgatataaccccttgcctggattcaggatggtaagggtaagtgactcccagggcagggcccaggacccacgtgtgaggacaggacacgatcaagagtcccaggacaccaacatcccctctatctgggcttcaggatcctgagggccggaatcccagcgggtgagggcctggggcacactccacttacctgcgccgggcccatcagcaacgctggcaaccccattagaacctgtgggctgggcagggccataacaggaggcccagggctagccctgccgctgggccgaaccctcacacttccgctgggtgacggtcgcactcaggacctgtcttcccaaatgcaaaatgcgcgcaaggcctctgggcaccgcagggacgaaggctgggtatggagaccctggagacgcgtggcgctggctccactttcgggaacaccttggctcataaaagcagagtaattagccgggcactatggtgcgtgtgaaggcgcggtgacggtccctgcacccactcccgtgccctggtgtggctccagaggcctgctgtagcccaacccaccagcagcaaaatgaggaccgcaatggcggcgccggaagtcccgcctctcaatgacagctcggacttgccactggtccgagctttcattggctcaaggatccccgccgtctatgacgctatttccctatgcccgtcacgctactgctaggtcgttgccaaggtgattgaggaatggcgtttattgcgtcgctgctcaggcaacgcaaactacattatccagaaggaccctcgcggtgcctcagggctggccattggcagccgaggagacaggcacttccgggcggagtgtaagacgctggccaatcacagcctggcagcgggacttccgtcgtcgtcctcggaccatcactttggcatttctcgattttgtctgcttctgaagggaccgcgttgtcaggcgagggacggaatcttggaggctccctgggcccatggaaacaggagcgaggaaggcacgagagtcggggaagttccgccttcttgacatacaagcgcccccaccgcggcgaatatcgcccctgagcccagtgttcgccccccacaacaccgcaccccccttccccaccctgtgccttagataaagccggcccagtgggaccctcaggttgcaccgcgcggaggtgtccgcggctctcgggagtcgtcgcccttggcgttatgttggctttagggagcgcgaggccgaggccaagaaaagctacgcattgggaggtcttgacccagtgtgcgcccggctgtaggcatggaacgtgcgccaaaggtctcctggcacccactccgctggactcagcaccattgtcctaagtctccgattgagaagtatctgccccaggtcctctgcgggccccactgaacagtgtggagcgttcacaggttgggggtcaccatttcagaatccagtttgttgagacgtggagggtacaggaggagggatctgcatatgcgaagacttggacttgaccctgacctgagcgttcaggcaggctctcatgcccccttggcagcgagtggagagcgtaagaggagtcctgcctctcctggcacaccgagggcgcctgggagccatgaaaggtgttgaacagaaaagggatggacatgacctgagttagaatttggaaagtatttcagtggttgctgaatgaacacactactggagaaggtggttgtagtggggctggaagcagggagactgtgggggaggttattgcagtattgttccagacagttatgatagtggcctgtccagaacggaagcaagaaggatgggagaagtgatcagattcccagtggatcttcaagatagagctaatggaattttttgctaccttagataagtggaataagcatgagtaggggtgaaggaccatcccaagtagttaggaagaattaggatgcctcctgtggagaatagaggttggcagttggcaggaggaggatgtttcatggaagattagcgatggattttgtaggtatagagtctgaattgtctggagacctgtgagtggaggtgtcaaatgggcctctggatatatagaattctggtgtggcttcaggacgtccagactgcattatgttggtggcctggcccagtgaacggcctgaggataggatttgggaaggagggttttaggttggaggaccagtggctagggctcacgctcagtgcttagatcacatctgtctgcccattggcttggtgttgcagggcttaatgacctttgaggacagggtcagtacatcttccaagaatgtggggctccttagtgaggtccaagggggcttctacagtgacatgatactacagagctttgtactccagtgcccactaggtaaggctactgtgtctcctctttcccctacacatgaaatctaggttttcctccgcctttccattgttccctctgggaggtgctgctggccctggcactggccagtgtcctgctgtgtccggaattgtttccttcctctgggttcttggtctcgctgacttcaagaataaagccgcggaccctcgtgttgagtgttacagttcttttttttttttttttttgagacggagtctcgctctgtcgcccaggccggactgcggactgcagtggcgcaatctcggctcactgcaagctccgcttcccgggttcacgccattctcctgcctcagcctcccgagcagctgggactacaggcgcccgccaccgcacccggctaattttttttttttgtatttttagtagagacggggtttcaccttgttagccaggatggtctcgatctcctgacctcatgatccacccgcctcggcctcccaaagtgctgggattacaggcgtgagccaccgcgcccggccctgttacagttcttaaagatggtgtgtccggagtttgttccttcagatgttcagatgtgtctggagttttttccttctggtgggttcgtggtcttgctgacttcaggagtgaagctgcagaccttcgcagtgagtgttacagctcttaaaggtggcacatccagagttgttcattcctcctggtgggttcgtggtctcgctgacctcaggagtgaagctgcagacctttgcaatgagtgttacagctcgtaaaggtggcgtgtccaatgttgtttgttcctcccagtgggtttgtggtctcgctggcttcaggagtgaagctgcagacctttgtggtgagtgttatagctcataaaggtagtgtggacccaaagagtgagcagcagcaagatttattgcgaagagcaaaagaataaagcttctacagcatggaagaggacccgcgggttgccgctgctggcttgggtggccagcttttattctatttggccctgcccacatcctgctgattggtccattatacagagcactgattggtccattttacagagcactgattggtccattttacagagcactgattggtccatttttacagagtgctgattggtgagtttacaaacctatagctagacacagagtgctgattggtgcatttacaatcctttagctagacagaaaagttttccaagtccccagccaattagctagacacagagcgctgattggtgcgtttactaacctttagggagacacagagcgctgattggtgcatttttacagagtgctgattggtgcgtttacaaacctttagctagacacagagcgctgattggtgtgttggcagtcctttagccggacagaaaagttccccaagtccccactggacccagaagcccagccggcttcacttttcactgctacttatccctggctgctgcataaacaacccccacaccttccctgggatcttgacaaccttgtgaagccacagtgatggtccctgcacccactcccacgcccttgtccagctctagaggcctcctgtagcccaacccacaagccacaaaatgaggaccatcatggcggtgccggaaatctcacccctcaatgcccacctggaatcggaagtctcaaaacctgtgtagcatatcacatgcagctgggtcgtttcctggctaggttaccctgtcaggatctgtgacttttctgtcctttctgccacattccctcactctagtaggagttttctgccagctgtcccttgtgagtcccagtgggcactgacatggtcattgattgtggggtcactgagcattgactttgtgaagttcagttctttccagctatatacctgcataggtgatcttcacctacggtgatttgtcatggggtggatcaccttgacgtgggctgccttctcacaaaccacttgatgagagctgtataggatcactgccaccacccccgccatgtgatcacctaactagaacaaatgaagagacctggctggtggacagggtggcttgaattaggccatggacagagaggccccatggtgcaccagttctgttgagtggaagacagctgtggcagagctgttggcagtgccctggtggctcacctggtacctgagttgtgccctctgttgtcctggcaccaggatgtatagctgtgccttttaaaaaaaattttcctgaccttcttctgacactctatcctactttgccctgactcctgttccctggatggcttcctctctgtcttccaagattcactctttccccttctcccgtcctcccctccagtggccaggtcttctaccattggcctccctttaatgtgtcttgaacggataatgtatctttaaatagttgttatctgcacatggtggctcataactacagtcccaactacttgggatgctgaggcaggaggagcgcttgagaccaggagtttgagtccagcttgggcaacataacgagatcctatctctaaaataaataaataaatacatagatacctaaatagtttttgaaaacctcttcttccgtgagactggcttgttccatttgaggagtatgggcataggtgtcaatggttcaagacctggacttcgctcactgcatggtactgacctgtcaccagacactagggccctgcagctccacattttgcagaacctacagagaactgacactgaagagatagctgataaatacacagcatatggaaaggtgtttgaggggaagcaagccttttctcctaccaaaaaacttcacagtggaaaaaattgcaagtgtattatgagcatgggaaggccttcacttttgtcttcatcctgagaaagcaggagtacatgcacatcttcaaaggcccttacaagtatagtaacatggggaatcctccagccagaactctacctcctttgagcaccaatatgttcaccccagagaaagtccccataagcgcaaggagtgtggtccagccatgagcaaaattttgcaaaactctcctctgtatcaaaatggtcataccctaatgaaggactcctaagttcagggaatgtggggcactgccagctgtcctggtggcttccctggtacctgacttgaggttcatacatgttatattcagagttctgctttcattagcaaaaacaaattaacaccggaaaatggttgtacaaatgcaataactacatgaaagctttcagtgaaatatgaaacctcatcctgcagaattctcatcagagaggcccagtgcatgcagctaatgttggaaagcctattctcaattttaatcctatttagcaccagcaatttacagcattgtgagtgtagcatgtaggagagcaaaaaattgcagctcctgccttgatgtgcacaaagtgattcacactggaaaaaccctctatgagtgcagccagcatgggagagcatcggccacagctcctgccttgcttggcaccagaaacttcaccctggagaaaagccttttgattatagtaaatgtaggaaagtcttcacctcccttatttagtataaaagaattcacactggccaggtgtggtggctcatgcctgtaatcccagcactttgggaggctaaggcagggggatcacctgaggtcaggagtttgagaccaacctggctaacatggcaaaccccctctttacaaaaaatacaaaaatcagctgggcatggtaacgcccatctgtaatcccagctacaccagaggctgaggcaggagaattgcttgacctcagggggcagaggttgcagtgagctgagttagagccactgcaccccagactgggtgacagagcaagaccctgtctccctcaccaaaaacaaacaaacaaacaaacaaaaaacacagctgggtgcagtggctcacgcctgtaatcccagcactttgggaggccgaggcaggcagatcatttgaggtcaggagtttgagaccagcctggccaacatgatgaaaccctgtctctactaaaaacagaaaaattagccgggcatggtggcaggcacctgtaatcccagttactcaggaggctgaggcaggagaatcacttgatcctggaaggcggagattgcagtgagccaagatcatgccactgcactccaacctgggcaacagagtgaaactccatctcaaaaaacaaacaaacaaaacaaaacccagccctacatgagtagccttcagccacagctaaaccttgtgtagaaggattcctccctgaggagacactccatgatggccctgcatgtggagaagctgacagaacccatgttgtaccatgatcgccctgcatgtggagaagctgacagaacccatgttgtactttgcaacccgctgagggaccttggcagagctatcacaccactgggtcctgtggtggaagcccatctctgttttatggtgacttcccagttgctcaatgtaagtcactccctgtttcctgtttatactaccttggagggatggtaggggccttgcacacattggggtggtatcatgctcactcatgatggggtttgacatggacatgaccccattccaagcaaggagcctgattggataatttctttctcttttttttttttttttttttttgagatggagtctttctctgtcaccaggctggagtgcagtggtgcgatctcagctcactgcaacctccgcctcccgggttcaagagattcccctgcctcagcctcccaagtagctggaattacagccacacaccacctcgcccggctaattttttgtattttagtagagacagggtttcaccatgttggccaagatggtctcgatctcctgacctcgtgatccccccacctcggcctcccaaagtgctgggattacaggcatgagccactgcacccgacctctctccttttgtcttttcttttttcttttcttttcttctttcctttcctttcctttgctttcctttccttttctttcttttctcgtcctttcttttcttttctctctttcttttttttgaggcagagtctcactctggtgctcaggctggagtgcagtggcatgatctcagctcactgcaacctctgcctcccggtttcaagcaattcttctgtctcagcctcccaaatagctggacttacaggcgtgtgccaccatgcctggctaatttttgtatttttactagagacggagtttcaccatatattggccaggctggtctcaaactcctgacctcaagtgatctgcctgcctcggcctcccaaagtgctgggattactggcgtgagccaccatgcctggccgacaatgcaggagcttaaccaaaggaccacgttggctagggtcaatcagctgccccaggtgaccacccttagtgctaatcctgtgcagggtaggggtctgagccaaaaagaggaggctcttgtgtgtacagaaggcaatttgttgctatttttatttcatgcccaattcattaagaatgtttcaaacaattagcatttttctaagtattaagtaattaacatttgcctgaagaattacacattagatggataatgtaaaaataaagtgtttaagaagttaaacgtctccaaacattaaacattacttgagattggacatgatgggtcatgactgtaatcctagcagtttgggaggctgaggcaggtggattgcttgagtacaggagttcgagaccaacctgagaaacatggtgaaacctcgtttctacaaaaaaagtaaataaaattagccaggtgatatggtttggctgtgtccccacccaaatctcatcttgaattgtaactctcataattcccacacgttgtgggagggacccagtgggagataagtgagtcatgggggcagtttccccacactgttctcgtggtagtgaataagtctcaagagacctgatggttttataaggggtttcctcttttgcttggctctcatttgctcttacctgccaccatgtaagacagggctttcaccttctgccatgattgtgaggcctcccagccacatggaactgtgagtccattaaacctctttgtcttcataaattacccagtctcaagtatgtccttatcagcaatgtgaaaacagatgaatatagtaaattggtagagtggggtactgctataaagatacccgaaaatgtggaggcaactttggaattgggtaacaggcagaggttggaacagtttggaagcctcagaaggagataggaaaatgtgggaatgtttggaacttcctagagacttgttgaatggctttgaccaaaatgctgataatgatatgggcaatgaactccaggctgaggtagtctcaaatggagatgaagttgttgggaactggagtaaaggtgatgcttgctatgttttagcaaagagactggtggcattttgcccctgctgtagagatttgtggaactttggatttgagggagatgacttaaagtatctggtccgggtgcagtggctcacgcctgtaatcccagcactttgggaggctgaggcaggtggatcatgaggtcaggagatcaagaccatcctggctaacatggtgaaaccccgtctctactaaaaaaatacaaagaaattagcctggcatgatggcgggtgcctgtagtcccagctactcaggaggctgaggcaggagactggcatgaacctaggaggcggagcttgcagtgagccaagattgcaacactgccctgcagcctgggtgacagagcaagactccatctcaaaaaaaataaaaataaaaataaagtatctggtggaagaaatttctaagcagcaaagcattcaagaggtgactttgatattattaaaagcattcagttttaaaagggaaatacagcataaaagttcagaaaatttgcagcctgaccatgcaacagaaaagaaaaacacattttctgtggagaaattcaagaaatttgcataagtaaccaggagtcaaatgttaatcgcccggacaatggggaaaatatctccaggacatgtcagagacctttgtggcagcccttcccatcacaggcccagaggcctaggaggaaaaaatggtttcgtgggctccccctgctgtgtgcagcctacagacttggtgccctgcatcccagctgcttgaactatggctaaaaggagccaaggtacagcttaggctgtggcttcagagggtgcaagcctcaagccttggcagctcccatgtggtgttgagcctgtgggtgcacagaactcaagaactgaggtttgggaacctccacctagatttcagaagatgtatggaaatgcccagatttggagcaggcaaaagtttgctgcaggggcagggccctcatggagaacctctggtagggcagtgctgaagggaaatgtggggttgaagaccccacactgagtccccactggggtactgcctagtggagctgtgagaagggggccaccatcctccagactccagaatggtagatacaaccaacagcttggaccacgcacccggaaaagtcacagacactcaacaccagcccatgaaagcagctgggagggaggctgtaccctgcaaagccacagagctgcagctgcccaagaccatgggaacccactgcttgtatcagtgtgacctggatgtgagacatggagtcagaggagattattttggaactttaagattcgactgtcctgctgcatttcagactttcgtggggcctttagcccctttcttttggccaatttctcccatttggaatgggtgtatttatccaacggctgtaccccaattgtatctaggaagtgactaacttgcttttgattttacaggctcataggaagaagggaattgccttgtctcagatgagattttggactgtggacttttgagctaatgctgaaataagtagactttgggggactgttgggaaggcacgattggttctgaaatgtgagcacgagatttgggaggggcgaggaacagaatgatatggtttggctgtgtccccaaccaaatctcattttgaattgtagctttcataattcccacatgttgtggaaggggccccagttagaggtaactgagtcatggggacagtttcccccatactattcttgtggtagtgagtaagtctcacgagatctgatggtttcataaggggtttcctcttttgcttgactctcatttgctcttgcctgctgccatgtaagacgtgcctttcaccttctgtcatgattgtgaggcctctccagccacgtggaactatgagtccactaaacctctttttctttataaattacccagtctcagatatgtctttatcagcaacgtgaaaacagactaatacaccaggcatcgtggctcctgcctgtagttccagctacttgggaggctgaagttggaggactgtttgagcatgggaggcggaggttgcagtgacccgagtatgcaccactgcactccatcctgggtaagagagtgagaccctgtctcaaaaaaaaaaaaaaaaaagtaaaaaaaaattgcttgaaatgttaataatgcctctaagcatttgattaaatcacaatagtacttaagtgttcttaaattctttcaaagcaggaaaaatttaaataaaaacattcaaaaattgtcgagctatcttacactatagggatctacaagtagaatcaattctgtggacagttatagctgacagtagacagatatttatagatggaggtgggtatagaggaagacaaaatgaattaacgtacttgacatctgagaactgtctaaggatcctaaaaacaagaccctcacagggaagcaacaaagagagaatcgtttattctctgccaacaacatggtcagtctacattgagactgccctgccttttgttgttatgtgtcaaagacacttagattggtccagagaaaaaaggaacaaagcatccatgttgtgatgtgtggggcaaagcaagaactagatggtctaaggacaagcaaggctggggaattaccttctgctcgtccaagttacaaggaaaacaagttttgggcgagcgtccaagaacaatcacagaatcaagacaaatgacaagcgggtagtgtcattacaggctgagaattcttggtgtagaggttgaaaaacggaccttaaacctttacgggacactgacacacagagagatcaaaccctcgcccaggatgcacagtcagtgagatgcaaagctgggaagggaacccggagctccaggcatctgctcctccacctacacctgccctacccggtgcgttttctcctccctgctacctgctggtgttgccttctggaacctccgcagtttctgctttcacacctgcagggtttagtctccagggctgcttaggtgggtgccaggaactgggaatccccaacgcgggacaacctgccgggcgactcaaccagtgccacggagcccttggaaacccgcggcagctgcgctactccatttccaggcgcccagcgcggcggcgcttagccgttgccatggagactggtaatggccccgcctccgcgccgaaaaacaggcaggaaccacataacccagaaggctgtgcgcaagcgtctgcgcgcgtattggggcaatgtgagctctgggggctggacttccggcgttgggactgtcacttggctgctcgcgtcaggccacaccggtggtctgggctgtggcgcgcgggtcggggcccgaggcgggcggccaggaaggtacggaccacgagcagccggccgcgcccccaagcctcggtatcttcgagtatgacgtggtcggcccgggggcggtcgggccccggcgggaaccacgcgttctcccgccccgcggaagcccaggaggcagcgcattgggcattctgcgcccatgactgccgggcaggctgaggcgcggggcagccgcgggaggctgctggcggggatggcggtcccgggtggtccatgcctttcttccctcccagttgcgggttccgctggcggcggtggcgctgacaagcccgcgccgggggggcgggggagtccctgctcacacagactgcgcccccacggagtgaggccgcttcctagacctcgcctagtcgtctttcctctccctgccctgggggggttgcgggggtcagtgcaaactcctgcgtccagggcactggtgagctcccgacttccggcagccagggggctgaggtcccgaaggaggctccgaggggagagtcctgcgtgtgcaaaacctgggaggggagccgaagcccagatgcttctgggactgagcgctctcgatgtggagctggagtagaggggatgtgtgcggctgcagtagcaggcgagggagtgggctttatctcgagggcgtcgggagacatagaagttttgaacagaatcaggacatcctctgagttgggactttaaaacggttccaccgtttgttgcgtggagaacagacatgcaggggtgtcggcatgaagggaagaaccgactgccacagtctgggcagcagtggaggtgggcgaccaggtgaattctggtggatctgcggatgcatcaggtgtgggctgtttgaagaactaagtaccccatgttgttcagcctgagcgcctggaagaagagagctgctgtagatagaaaggagaattgaaaggaaagcaggtttccttcaggggaaagatcaagagtctgggatgtcccaggttggtcatgtcactggacctgacgttgttggtgtcctgggctgaggacagggcctataaactggactgaagaaggcgatgagcagtcaggcgtgcggagttacagcttgagggtaaagaaaaccggctggggtgcctgaggctatcaggggaggagttcggcaggtggctgaataggagagggtggcagcaatgtgggaaagaaattgcgggagcgctgagatcgagaccatcctggctcacacagtgaaacccggtctctactaaaaatccaaaaaaattagccaggtgtggtggcgggaggctgaggcaggagaatggcgtgaacccgggagccggagcttgcagtgagccgagattgccccactgcactccagcctgggtgacggagtgagactccgtctccaaaataaaaataaataaataaataaataaataaataaataaataaataaataaattgaggagggggcgccatgtggagggaggaagggattgagttcccctgtgttcacaggttcttggggctgcacccctatgacgactggtggggatcatccagtccctcaggctggatgagcagcctggaaatgtcaggcaagcgcagcaggggaaggtctcagtgatgggcatgcctggggggtccacagctgggacttacacccttgcttattacaaaagcaagaagggcacatctggggagggtcatgaatggtcatgctgagtcacgagtggatatttggggctgcccttggtgtggcagctaagggcccagccagggcttgctctagcctgcttgtgtaggggtggccagtggggaagtcaagaagccatctggggcctggaccaggagggcagaggggaggggtcccagacaggtgagggaagtgccacctgaagataatctcggggtggaacccaaggaaggagggacactgggggaggtgactgttgggatggggagcttggtcctggctcacagccataccttagaccatgcctacctccacctccctgctgttttaggacctgatgaccttcgaggatgtggccgtgtacttctcccaggaggagtgggggctcctggacacagcgcagagggccctgtaccgccacgtgatgctggaaaacttcacacttgtgacctcacttggtaaggccctgggtgctccatgaaaagtgcacttggtgacaatcaggactgcctcttcacttccctcctggttgatgagcaggatcaaatctggccagggccacgtggaacaagggtctggtcctgtagacacaaagtttggttgggtcagccactccttgccgccctgtccagctgtggcctctctcatgcctgggctcagtcccgttgctttggtgctctgggcacagttgctgctctggggacacatgagctattcctatgagccccttgccctgtgctatctttagattctcccagttgcacagattactgtctatttccatgaagccctgactcctgctctctgttgggaggtgggttgtcttgacctggggctgggctctcacctgctcctcctcacaggactctctacctcccgacctcgtgtggtcattcaacttgagcgtggcgaggagccctgggttcccagtggaaaggacatgaccctggccaggaacacctacgggaggctcaactctggtgagtgggagctcaggtggggtgaactaaggaccaacctgtggccaagcccatgtccctgcttttctgactctggaaacacatcctcctctcctgcctcctacctgactcccttctcttccatcatcagcctctcctggaggctgctgccttagtaggtgcccttgaagggagagctccaagggcacaggagctgggttcacacagaagggcctaccttcagctgggctgtgtggccttgaaccctccacaactagcagccattattgataggtatttatttcgcccatcatttatctttgtattcatcaaatgtttcctgagggcttgtgggcattgtagacacagccttgaccaggacactcatggtcctgcctttgtggggctgatggtgctaggggagacgcagtgagtacgtaggattcaggagtgcagtcttgagcattggttggaggtcattgcaagagcaggtttgggagtgggtgcccaagacggggcaccaggggagaagggagtgagctatggaaagggagggggtggaacagccagtgtggagacgtgggtggcacgcagcagctgctgttttcctcagcttcacatcctgggtgtctgggggctgccgccttgatcatgggagtccccactgcagtcagtgccacacctgtcagggcagatgcttcctccaaaccccagcccctcctgcagagccagcctcacctcttctttttccctaagcttttgtcccggctcctgggctcccccttgcctgtccactcagcctgccctggtcctctcctaaccaggatgccccaggcaaccaccgtttctctgcgtttaggttcctggagtttgacagaggatagagatgtttctggagaatggccacgagctttcccagataccccacctgggatgactactagcgtcttcccagttgccgatgcctgccacagtgtaaaaagcctgcagcgacaaccgggtgcctccccatctcaggagagaaaacccacgggggtgtcggtgatctactgggagaggctcctgctaggctcgcgcagtgaccaggccagcatcagcctgcgactgacctccccactcaggccccccaagagcagccggcccagggaaaagaccttcacagagtaccgggtgcctgggaggcagcccaggacgcctgagcggcagaagccatgtgcacaggaggtccctgggagagccttcgggaatgcctcggacctgaaggccgccagtggtggcagggatcgcagaatgggcgcagcttggcaggagcctcatagactcctcggtggccaggagccctcgacctgggacgagctgggcgaggctcttcacgctggggagaagtccttcgaatgcagggcgtgcagcaaagtgttcgtgaagagctccgacctcctcaagcacctacgcacccacaccggggagcggccctacgagtgcacccagtgcggcaaggccttcagccagacgtcgcacttgacgcagcaccagcgcatccacagcggcgagacgccctacgcgtgccccgtgtgcggcaaggccttccggcatagctcctcgctggtgcggcaccagcgcatccacacggccgagaagtccttccgctgctccgagtgcggcaaggccttcagccacggctccaacctcagccagcaccgcaagatccacgcgggtgggcgtccttatgcttgcgcacagtgtggccgccgcttctgccgcaactcgcacctgatccagcacgagcgtacgcacacaggcgagaagcccttcgtatgcgcgctctgcggtgctgccttcagccagggctcctcgctctttttgcaccagcgcgtgcacacaggcgagaagcccttcgcctgcgcccagtgcggccgctcctttagccgcagctccaacctcacccagcaccagctcctgcacacgggcgagcggcccttccgctgcgtggactgtggcaagggtttcgccaagggcgccgtgctgctcagccaccggcgcattcacacgggcgagaagcccttcgtgtgcacgcagtgtggccgcgccttccgtgagcgccctgccctcttgcaccaccagaggatccacaccacagagaagaccaatgccgcagcaccagactgcaccccggggccaggtttccttcagggacatcatcggaaggtgcgccggggagggaagccaagcccagtcctgaagccagcgaaggtctgaggtcacaggtcgcagcccaaccctttcttggccttctgtgaatcccttccacagctaaagggtccgagtgctcttcagatccacgatggggaaaagctctgtgcctgagagtcagggacgagggagaccctttggctgtggttccatttgcaggtggggacaggatttgccagtttagtcatagctcacacctccatcctcaaagaggtaacactgcagaaacatcagagggaggacatgtcagctggaactctggtggggctgaggctgtagttggggccataggacgccgacaaaggcagcgctgcatggtggtgctacttcatgtgttatgagagtggatgctgaggtgagggggatgcggacatggggtaggatgacctagagaaacttatgatgtctgcacacaaactggccgctagacggacgctgaggacattttccccctgaggcctctattcaaggcttcctgggggccatctcagcaaacaggagactacaggggactggggatcagggtgtggcctgtgagtgtcagcctcctcctcggaaaaagaaaagctttgggtcaactcagcatcatgtttgcagatgctgacagacgggatcctaatgagagtcaatgtgtgctcactgccagctcctgggctgtgctctggtcagccaggtgtgagggcctggcctggggtcacacagctgactcaggagaggaatgcccatggttctcagcattggaaggacaaacctaggatgatggctttccagtggcactcgttcaggttttcgtccaagtctcagcttggccaaggcctgtcgctcactcatttacaaaagtcgatgtgaggaggagcctttacacctgtggagacagtgatagctttggagcagataaggtggagctgctcatttttgctggatttggtggccgatccccgcccccacccccaccccctccatctcacctttcccttgttatgcctcctcaattggaggctggacagagagctgaataggaaggacttgccattacctaaggccatgtgtgacagcctcctgaggacctccccaacccagtgtgatgggcctgcatggcagagacaaaagggtagactgggggtcatttgcttcctgtggccttaagcctactaggccccatccttacctgagacctcacctccaagaaattaatggtcttttcaatggagaaaaaaaaagactagtatttgcaacttcaaatagatgtagtttcctttacagccgtgtggacctccacagcacagcctcctgtctctattccagggtatgattcagttgtttgtttgtttttgagacagagtctcaaggcaactcttcttgcccaggctggagtgcaatggcacaatctcggctcaccgcaacctccgtctcccaggttcaagtgattctcctgcctcagtcttctgagtagctgggattacaggcgcccaccaccatgcccggctaattttgtatttttagtagagacagggtttctccatgttggtcaggctggtctcgaactcccaacctcaggtgatctgcccatcttggcctcccagagtgctgggattacaggcgtgagccactgcgtttgtttttcatgaagcgtctcagtctgtcgcccaggctggagtgcagtggagcaacctcggctctgcctcttgggttcaagccattctcctgcctcagcccctccagtagctgggattacaggcttgcaccaccatacctggctaatttttgtatttttagtagagacggggtttcaccatgttggctgggctggtctcaaactcctgacctcaagtgatcggcccatcttggcctcccaaagtggtgagattacaggcgtgagccactgcgcctgcctacataccatgattttaaagttgcagctgtttcctattgcttgtaactcagtcttgtcttttcaatggtaaccaatttctgtttcaaactgaaaggttcatgagggtgagttcttctattagtctgttttgtgtcactataaaggaacacctaaggctgggtaatttataaagaaaagaggattaattggctcatggttctgcaggatgtacagccatggcaccagcatctgcatggcttctggtgggacctcaggaagcttgcaatcatgatggaacatgaaggaagagctggcatatcacatggcaagacaggaagcaaggcgggggggaagtgtcacacatttttttttttttttttgaggagtctcgctctgttgtccaggctggagtgcagtggcacgatctcggctcattgcaacctccgcctcccgggttcacgccattctcctgcctcagcctcccgagtagctgggactacaggtgcccgccaccacgcccagctaatttttaatatttttagtagagacggggtttcaccgtgttagccaggatggtctcgatctcctgaccttgtgatccgcccgccttggcctcacagcagagtggtgggattataggcgtgagccaccgcgcccggcccacttttttttttttttttctgaaatggagttttgctcttgttgcccaggctggggtgcaatggcacgatctcagctcactgcaacctctgcctcctgggttcaagtgattctcctgcctcagcctcctgagtagctgggattacaggtgtgcaccaccatgtcagctaatttttgtataatatttttagcagagacagggttttgccatgttggccaggctagtctcaaattcctggcctcaagtgatccacccgcctcagcttcccaaagtgttgggattacaggtgtcagccaccgcacccagcccatcacacacttttaaacaaccaaatctttcatgaactcagagcaagagctcacttctcaccaagggggatggtggcaagctattcatgaggaatctgcccccatactatagtttggatgtttgtcccctccaaatctcatgttgaaatgtaatcctcaatgttggagatggggcctggtgagaggtgtttgggtcatgggggtggatcgctcttgaatctcttggtgctgtcctcaaggtagtgagttctcacaagatttggttatttaaaagtctgtggcacctccttcctttctctcttgctcctgctctcaccaggtgagatgcctcctccccctttaccttctgccatgattgtaagcttcttgagaacctagcaagaagcagattctgaagccatgctcgtacagccctcagaacagtgatccaattaaacctctcttctttataaattacacagcctcaggtatttctttatagtaatgcaggaatggcctaatatacctcatgatccaacacctcccactaggccccatgtccaacactggagatcacatttcaacatgagatttggaggagacacacatccaaaccatatcagttctcttgtccctgagtgaagaggcacttgctccctctaaacccaattctaggtgactagagatttatgaaggtgtcgggatgtttgttcatgatgcatagtggcctcatagggtctccctacttcttctgcaagaagaacaccttcaggggctttcagctcagccagaagattcacataaaggttgttcatctggtaccttgagcactctgccaacacaggtgatcacagattccaagacacataaaagagtgaatcacaactcactggtgactcattgaggagtgatgctcacaaagcaacacacttcgtctaaatacactgtactaaccttggtcacttttgaaaaggtatttctacaattatttgaaactgctcatgaaaactgagctttcccttaaggagcaacccccccacccttcgaaacctatggagatcctatttccaaaaacttaggtaaatggacccaggtcactcgagatgaccctaaaatgcagtggccaaaacggagatcttttgaaattcctaaagtaatatatttgtgtgcacaataggaaacttaatatgtttgttctaaaaccagacaaattggatgggaggcctactttctgtttgtgcaggctatactctgataagatatttgaaaggttttttaaaaagagctctataggccaggcacagtggctcatgcctgtaattccagcactttgggaggccaaggtgggcggatcacctgaggttgggagttcgagaccagcctgaccaacatggcgaaaccccatctctactgaaaaatacaaaaattagccaggcatggtggtgcgtgcctgtagtcccagctacttgggaggctgaggcaggagaatcacttgaacctgggaggcggaggttgcagtgagctatgaaactatagcaaactccagcctgggcgacagagtgagactccgtcacaaaagtaagtaaataaaatacaatgaattctatggtcagatgtcagcttaattaaaagctgatattcaggctttttttttttttttaagaaaaaatacctttctgctttttctcatttggagcctgtttctgggaattttttttttttctgttgactgaaacccctttttacatatgtttagtccctttgtttgcttcttttcttgttagtatgatgtaaagttttattggccttctgaaaaacttaaaatctccccaaattggcttagagctctcccattttcttctactttttcttcctttagctatctttgataccacataaagaaatctagaggagtcttctaatatctctgagaccctttgaggaacacagtaaagtgtcacatacaccttttatggagtcttctgtcttcctcatggaatcctaagtgtagcaggcagtttatcttaggtctaaagctctgatctcttttacactgagttctctgaccttttggcttggggggtaccaagggttactttgttctatgaaagaacatgatctttgggtgtgcactggctggcaagttactggcaagggctgcagttttggctgatagcagttgttttcagtgagtggttattactgcagggtgtactaattcctttgcatgtttaaataagaaaagtatggtttgaacacttggagacttatagaaacactcatcaccaagggggaagaatcctttgggagatgggctgatcacagatcacagagtgggctaattggtgctgggtgtcccaccagcatcagggaatgtccatgcagtgaggtgcactgtggaaacacagccctgtcctgtggtatttccatcttgtggggtcctcaagattccattttaaagtggaatccttgattttatttatttatttttattttttgagatggagtctcgctctgttgcccaggctggagtgcagtggcgtgatctcagctcactgcaaggtccacctcccgggttcacgccattctcctgcctcagcctcccgagtagctgggactacaggcgcccgccaccacccctggctaatttttttgtatttttagtagagacggggtttcaccatgttagccaggatggtctcgatctcctgacctcgtgatccgcccgcctcggcctcccaaagtgctgggattacaggcgtgagccactgcgcctggcctggaatccttgatttttaaagctctagatgttctgcctttcaactgtgccagttttttacatagatggggtttctctatgttggtcaggctggtctcaaactcctgacctcgtgatccgcctgcctcggcctcccaaagtgctgggataacaggcgtgagccaccgcacctggcctatgttgagttttaggccacaaaaaattgaccaaaaattttttgacaattgcatctttaaccatggacattttaagttttgtcctcagctgggcgcggtggcttatgcctgtaatctcagcactttgagaggccaaagcaggcagatcatttgaggtcgggagtcggagaccagcctgaccaacatggagaaaccccgtctctaataaaaatccaaaatttgctgggtgtggtggcccatgtctgtaatctcagctactcaggaggctgaggcagaagaatcgcttgaacccaggaggcggaggttgcagtgagctgagatcgagccattgcactccagcctgggcaataagagcaaaactccatctcaaaaaaaaaaaaaaaaagttttgtcctcttccttcttgaggagttgctttgaagcttcacagcaaccaaggaatctatttcactgatgaaacaattcaatctactttaacatatggctggttatttagaatgtccattttgcatactactctcagtcttccagactgctggaatgtacaaataaggtaatagaaaatcaatttacaaagcttacagaaacttttaaccttccgtggcctaaggcttttccaatggtcctgaatgaaggaacctacaaaccagctctccttaatgtgagctcctgggagacaaaaatatcaaagatcaagggctccaacctggagattttgtttatgagaaatgccatctaataaaggactccctacaaccatgttgaagagaactccagcctgggcaacatgatgaaaccccatctcaacaaaaagaacaaaaaaagcaaaaattagctggcatgcacctatagtcccagctacttgggaggctgaggtgggaggatggcttgggcccaggaggcagaggttgcagtgaggtgggttgtgccactgtactccagcctgggcaaaagagccagaccctgtctcaaaataaagaagttgagggaggcatatcagatattcttaaccaatccttgtgcaagctaaattcaaaggcattgacttgcagattcacatttttcatttttaaaaaatgcagcccatggccgggcgcagtggctcatgcctgtaatcccagcactttgggaggccgaggcgggtggatcacgaggtcaggagatcaagaccatcctggctaacacggtgaaaccccgtctctactaaaaatacaaaaaattagctgagcgtcgtggcgggagcctgtagtcccagctactcgggaggctgagggaggagaatggcttgaacccgggaggcggagcttgcagtgagccaagatcctgccactgcactccagcctgggcaacagagcgagactccgtctcaaaaaaaaaaaaaaaaaaaacaatcctgcttgagtagacatcttcgatcattccagatctccaactgaggcagtcccattccccaagaaggaagaggacaaaacttaaaatgtcatggttaaagatgtgattgtcaaaaaaaaaaaattggtcattttagtttttgtggccgaaatctcaataatcataattatgactgatagcataccatataccagtcatcttatagctcacacgaggatgagaagtagaaaatttgttagaaaatatcactcaggcggtcgggcgcggtggctcatgcctgtaatcccagcactttgggaggccaaggcaggtggatcacctgaggtcaggagttcaagaccaggctggtcaacatggtgaaaccccgtctctagtaaaaatacaaaaattagtcggttgtggttgcaggcacctgtaatcccagctactcaggaggctgaggcaggagaatcacttgaacctgggaggcagagattgcagtgagcagagatcacgccattacactccagtctgggccacagagcaagactccatctcaaaaaaaaaaaaacacacacacactaaaaaagaaaatatcactcaggccaggtgcagtggctcacacttataatcccagcacttttggaggccaaggcaggcggatcacttgaggtcaggagttcgagaccagcccaacatggcaaaaccttgtctctactaaaaatacaaaaattaggtgggtgtgatggcatgcacctgtaattccaactattcgggaggctgaggcacgagaatctcttgaacccaggaggtagagattgcagtgagccaagattgtttcactgtgctccagcctgggtgacagagtgagatgctgtctcaaataattaaattaaaaattaaaaaatgaaacgtttgaagagttaaaatgcctccaaatattcatacattgcttaaaatggtaataatgcctctaagcatttgatcaaatcacaactttaatactacttttttttttttttgagacagagtcttgctctgtcacccaggctggaatgcagtggtgtgatctcggctcactgcaagctccacctcccaggttcatgccattctcctgccttagcctcctgagtagctgggactacaggcgcccgccaccacacccagctacttttatttttgtattttttagcagagactgggtttcaccgtgttagccaggatggtctcgatctcctgacctcaagatccgcccacctcggcctcccaaagtgctgggattaccggcgtgagccacagcgcccggccacagcttgaatagttctaagtgttggggttttttttcttcagggtttttgaactttaatacttccttttttttttttttttttttttgaaacggagtctcgctctgtcgcccaggccggactgcggactgcagtggcgcaatctcggctcactgcaagctccgcttcccgggttcacgccattctcccgcctcagcctccccagtagctgggactacaggcgcccgccaccgcgcccggctaattttttgtatttttagtagagatggggtttcaccttgttagccaggatggtctcgatctcctgacctcatgatccacccgcctcggcctcccaaagtgctgggattacaggcgtgagccaccgcgcccggccctgaactttaatacttctaagtgttggggttttttttttccccctcagggtttttgtttgttttttcctgagacagggtctctctcttacccaggctggagtgcaggggctccatcatagctcactgcacactccaactcctgaactcaatcctcccacctcagcctcccatgtagctggtattacaggcatgcaagaccatgctcagctaatttttatatttttttataaagatggggtcacattttgttgctcaggctggtctcaaactcctaggctccagtgatcgctcaccttggccacccaaagtgctcagattccaggtgtgagccactgcgcccagtcctgaaatgttcttaaattctttcaaagtagcaaaatttatattaaaacattccaaacatgatgagctcccttgctctacaaggatttacaagtagaatcaattaggtggacagttatagctgacagttgacagagagatagttatagatggaggtaggtatagagggagggaggcaaaaagagttaaggaactggacagctgagaactgtctacaggttccaaaaacaagacaaagaaccttttattatctgccaaacaagacagtctacattgagactgctctgcctttcgtttttatgtgtcaaagacacttaaattggcctgtaatcccagcactttgggagaacgaggtgggcggatcacctgaggtcaggagttcaagaccagcctggccaacatggtgaaactccatctctactaaaaaatacaaaaattagccaggcatggtggcgcacacctgtggtcccagctactacggaggctgaggcggggggatcacttgaacctgaaggcagaggttgcagtgagccgagattgtgccactgcactccagcacgggcaacagaacaaagaccctgttaaaaaaaaaaaaaaaaaacttaaatgagtcccaagaaaaaaggaaaaaagaatgaatattgtgatgtgtggggcaagacaagatctagatggtctaaggacaagcaaatctggggaattaacttctgcccatccaaattacaaggaaaacagatgctttgggcaagtgtcgaggaacagtctcatacttaagacaaatgtaggcttacgggctgagaattcttggtgtaaaggttgaaaacggaccttaaacctttacgggacattgacacagagaggtcaaacccgcgcccaggacgcacagtcagtgagaggcagagctgggaagggaacccggagctccaggcatcggctcctccacctccacctgcgctacccggtgcattttctcctccgtgctcactgctggtgttgcctcttggaacctcggcagtttctgctttcgcacctgcagggtttagtctccgggactgcttgggaggacacctggaatgccgaaggcaggactacacaccgggcgaatccaccagcgccaccaagcccttgaaaacccgaggccgccgcgcgactccatttcccagcgccccgcgcggcaggggcttggacgttgccaaggagaccggtagtggccccgcctccacgcagggaaacaggcgggaaccacgtgacccggaaggctgtacgcaagcgtccgcggcgcgcactgggccaatgagaaccgaagggctggacttccggcggtgggactgtcacttcgccgcccgcgtcaggccacaccggtggtctgggctggggaccgcgggtcgggtccggtttccagggggttcctggtgctcgaggctggcggcgaggaaggtactggctgagggcccgcgtcgggcccgccctgcgcacgcgtcgtgatcaagggcgccggccgccggccgcgcccccaagcctctgtttctcagagtgcgtcgtgggcgtccaggggactgtcgggccgcggcgggagccatgcgctctcccaccgtgcggcagcccaggaggctgcgcgctgggcgttccacgtccatgatggccggggagactgaggcgcggggcggccccgggacgctgctggcggggaaaggctgggtggtccacgcctttcttccctcccagctgcgggttccgctggcggcggtggcgctgacaagcccgcgtcggggaagcaggggagtccctgctcacacagaccgcgccctcacggagggaggccgcttcctagacctcgcctagtcgtctttcctctccctgccctgggggggttgcgggggtcagtgcaaactcctgcgtccagggcactggtgagctcccgagttcgggcagccagggggctgaggtcccgaaggaggctccgaggggagagtcctgcgtgtgcaaaacctgggaggggagccgaagcccaggtgcttctgggactgagctctctcgatgtggagctggagtagaggggatgtgtgcggctgcagtatcaggcgagggagtgggctttatctcgagggcgtcgggagacatagaagttttgaacagaatcaggacatcctctgaggactttaaaacggttccaccgtttgttgcgtggagaacagacatgcaggggtgtcggcatgaagggaagaaccgactgccacagtctgggcagcagtggaggtgggcgaccaggtgaattctggtggatctgcggatgcatcaggtgtgggctgtttgaagaactaagtaccccatgttgttcagcctgagcgcctggaagaagagagctgctgtagatagaaaggagaattgaaaggaaagcaggtttccttcaggggaaagatcaagagtctgggatgtcccaggttggtcatgtcactggacctgacgttgttggcgtcctgggctgtggacagggcctatgaattggactgaggaatgggcagggactcagccaggtgtgggcagttatggcttgagggtaaagaagaccagctgggatgcctggggctattgggaagagcctagcacctaactgaggaggggagggtggcaacagagaggggaagaaaggggacaccgggtgaaaggaggaagggattgagttcctctgtgttcacaggttgttgaggctgctcccctgtggcgactggtgagaatcatccagtccctcaggctggatgagcagcctggaaatgtcaggcaagcaggctcagcaggggagggtcccagtgatgggtatgcctgggaagcccctgctgggactcacagtttcttgctacaagagcaggaagggtgcatctggggagggtcatgagtggtcatgctgagtcacgagtggacacctggggctgctcttggtgtggcagctgagggcccagccaggacttgttctagcttgcttgtgtatggcgttgccagtggggaggccaagaaggcatctggggtctggtcagggagggcagaggggaggggtcccagacatgtgagggaagtgccatctgaagatggtgggggcagaacccagggaaggagggtgagtgtctgagggacatcatggaaggtggctgttgggatggggagcttggtcctggctcacagccataccttaaactaagcttgtccaacccactgcccaggatggctttgaatgcagcccaaaacaagttcgtgaactttcttaaaacatgagatgtttatgcaatttttattttttttagctcatcagctgttattagtgttaatgtattttatgtgttgcccaagacaattcttcttccaatgtggcccagggaagccaaaagattggataacccagccttagaccatggctgtctcttcctccctgctcttttaggaccagatggcctttgaggatgtggctgtgtacttctcccaggaggagtgggggctcctggacacagcccagagggccctgtaccgccgcgtgatgctagacaacttcgcacttgtggcctcgctgggtaaggtcctagatactccatgaaatgggcaactgataacaagctgactggccagggctgccccctcacctccctggtggctgacgagcaggcctataccttgcagccaggagccatgtggaataggggtctggtcctatagacatgcagtctggttggctcaaccactccctgtggcgctgtccggctgtggcctctccgagccttggctcagtccccttcctttggtgccctgggcacagttgctgccctggggatgaatgagctattcctgtgagccccttgccctgtgccatctttagattctgcagttgcacagatgacattttctgtttccgtgaagccctgactcctgccctctgtttggaggtgggttatcttgagctggggctggactctaacctgcacctcctcctcacaggactctccacctctcgacctcgtgtggtcatccaactggagcgtggcgaggagccctgggttcccagtggaacggacacaaccctgtccaggaccacctacaggaggcgcaaccctggtgagagggagctcagggtggggtgaattcaggaccaacctgtggtcatgcctctgtccctggttcccagactccccagaagcaccctcctcccctccctcccacccgattcccttcccttccatcatcagcccctcctggaggctgcagccttagctgcccttgaaggtggagctccaagggcacaggagcggggttgacacagaagggcactcaggctatggtgagaccatctcagagtcctgctatcagctgggctggcctcaaaccctccatggctagtcactgccataattgatgggtcatttttttcacccttcatctttgtgttcagcaaacatttcctgagtgctcacagtggtcaggcccagtccaggcaatgtagacacagcctcaatcaggacgaccctggtcctgcttttctggggctcatggtgtggtgggagaggcagtcggtaagcaggattcaggagtatagtctagagcactggatggaggtcattgcaggagcaggttggggagtgggtgcctgagaagggggacaggggcggggggaagggggtaagcaatggaaagagtgtgggtggaatagccagtgtggagatgtatgcagcatacagcagccgctagttttcctcagcttcacatcctgggtgtcggggggctgccaccttgatcatgggagtgcccagtgtagtcagtgccatacctatcagggcagattgttcctccaaaccccagcccctcctgcagggccagcctcacctctacttttcccctaagcttttgtgccagctccggggttccttcttgcctgtccactcagcctgccctggtcctctcctaaccaggatgccccaggcaaccactgtttctctgcctttaggttcctggagtttgacagaggatagagatgtttctggagaatggccacgagctttcccagataccccacctgggatgactactagcgtcttccctgttgccggtgcctgccacagtgtaaaaagcctgcagagacaacggggtgcctccccatctcgggagagaaaacccacgggggtgtcggtgatctactgggagaggctcctgctaggctcaggcagtgggcaagccagcgtcagcctgcgactgacctccccgcttaggcctcccgagggcgtccggcttagagaaaagacactcacagagcatgcgttgctggggaggcagcccaggacgcctgagcggcagaaaccatgtgcacaggaggtccctgggagaacctttgggagcgcccaggacctggaggctgccggcggtcggggacatcaccgaatgggtgcagtttggcaggagcctcatagactcctcggtggccaggagccctcgacctgggacgagctgggcgaggctcttcacgctggggagaagtccttcgaatgcagggcgtgcagcaaagtgttcgtgaagagctccgacctcctcaagcacctacgcacccacaccggggagcggccctacgagtgcgcccagtgcggcaaggccttcagccagacgtcgcacttgacgcagcaccagcgcatccacagcggcgagacgccctacgcgtgccccgtgtgcggcaaggccttccggcatagctcctcgctggtgcggcaccagcgcatccacacggccgagaagtccttccgctgctccgagtgcggcaaggccttcagccacggctccaacctcagccagcaccgcaagatccacgcgggtgggcgtccttatgcttgcgcacagtgtggccgccgcttctgccgcaactcgcacctgatccagcacgagcgtacgcacacaggcgagaagcccttcgtgtgcgcgctctgcggtgctgccttcagccagggctcctcgctctttaagcaccagcgcgtgcacacaggcgagaagcccttcgcctgcccacagtgcggccgcgcctttagccacagctccaacctcacccagcaccagctcctgcacacgggcgagcggcccttccgctgcgtggactgtggcaaggccttcgccaagggcgccgtgctgctcagccaccggcgcattcacacgggcgagaagcccttcgtgtgtacgcagtgtggccgcgccttccgtgagcgcccggccctcttccaccaccagaggatccataccggcgagaagaccgtccggcgatccagggccagcctgcacccccaggccaggtctgttgccggggcatcatcagaaggtgcgccagcgaaggaaaccgagcccactcccgcctcgggcccagccgccgtctcgcagccagcggaggtctgaggtcacaggttgcagccctggccttctgtgaatcccttccacagctaaagggcatatgtcctctgcagatccacagcagagaaaaagtcccgtgcttgctagtcagggacaagggaggccctttggctgtgatttcatttgcacgtggggacaggatttgccagttcacccacagatcacacctccatccccaaagaggtagcactgcagcaacatcagggggaggacgtggtggctgaactctagtggggccgagactattcagagccagtaggaggccgacagtcacagcactgcactgtggtgcggcttcatgtgatatgacagtggatgctaaggtgagagggatgcaggcatgggttgggggtggcccagagaaacttatgacagctgtacacaaactggccgctggagagatgcccgctgagggtattctcccctcaacccactgcctctgttcatccaagacttcctaggggccagcctagcagacaagagaccacaagggactggggatcagggtctgggctctgtcagccgccacctctgggaaagagaaaaggtttgggtccactgaacatcatgtttgtagacgctgacaggtggggtcctaatgagagccaacacatgctcactgccagctcctgtcctgagtactgggaagtttctcctgaagccctgtgagatggctctgtggctggtatcccgacttggaagatgaggaaactgaggcacacggcctggcctggcttcacacacatagccgactcaggagagggatgcccatgggggaacatgtgactctcagcattggaaggacagagctaggatgatggctttccggtggcactcgttcaggtttttgcccaagtctcagcttggccaaggcctgtcactgactggtttaccaaagtcgatgtgaggaggaggctttatacctgaggggatgatgttaacttcagacaagatggagctgctcacttttgccgggtttggtggccacttcacccccaaccctgtctcacccccattatccctcctcaattggaggctggacagagctgaataggaaagacttgctattgcctaaggctatgtgtgacaccctcctgaggacctccccaccccagtgtaatggcccttcatggcagggacagaaaggtggactgggggccatttgcttcctgtggccttcagcagaccaggccctgtccctacctggagcctcacctccaaggaaattcatgttctccttaatggaaaaaaaaaaaaaaagactaccatctgcaactcagagtaggtgttgcagtttcctgtacagcagtttggacctccagagcacagcctcttgtccctactccagagcatggttcagtcttaatagcagttcaagagcttctctgataaaggtttctttttaaacatttgtgtgaacggtagcaacctgacacctatttcaccctcatacaatgcagatggtattgaacataccctgacatgccatcagcgtttgtcatcatcacagaagttcctggacttggcttcaacctgggtaccctcaagaggccacagagtagagatacagcctgtctgcagcccagggagggagtgggatacctgtatccttttcagggtcagaggtgggttggggtagccaggagctggatgaactgggatagagtggggctgtctggagcagcagccctgctagatgagtcctggtggatcctggcaatgggaggatggtaggtggagaaaccaaggcagggctgtgttccttctgctgctgagatagagggtgtggccatgtgtgatgaccctgcaaggttgactccaaccagtgggcactccatcccatggcttccaaaatcctgcagctatcctgccctatacacaaagagcccagatccaggccccacacacttgatattggggccagactcttccacctgtgaaacctcacaggttcctgcagggagtggagacacacagaacctagctcccctggagcctgcaagacttgggccaccagaatcccagtaggtccctgaaccattgtcccccagtaagtctgcagagctgtgaaatgcagacaataacccttccctgcctgaaagagcacttttctggggagcccatgggagtcaggagcaaaagcatctgtcaaacaagtagatacccagagagtcacgtgaaatcatttctatgcctctgacagacgcttcttgagcgaagtttctgccctgagcccgcctgaccccttaggctgggctcagtaccctaccttgtcttcccaccagccgcctccctccatcaagttcctttccacgtctgcttgtgcccctgttgtccctcagtttgtccaccctcctccaatcttcccctccccaaacccatgactgatcagtggcccccaacctaggctcccacctccatgcaggtcttggcccctcggctgacctccctccaacctccccctctgctcttaattttgaataggtagtgactgtaaaagtatccctgggcttctatgtcaaaaggtcagactgaacacatgcatctcactgggctcagaaatccactgaaaccacagaggggagtatttaaaacacataacccacaagtatgaggatggtgacagaggagtcaggagcaatggcattcctaagctagaagtgggtgagagctgtcactaagttagggaaggcaaaatactacgtggcgacttggcgaagaggagagagttcccaccaggctgactccagaaccgcagaaggctgagaaccagcagcccagagacgggagacctatatcaaagctgcctggggaacaactactgaagaagcccttaacgccccagtgctctccccacatggtggagggtgaaagtttttgtttttttttccttctgggactctgcatagtcccagagaaaaggcctaagcacctcatccccaaaaacaacctgaggaggccgttggaaagctccgagttgacaagtctcatccacgcacatgctcggtgcttccaatcggtgatcaagaccactgctcttcatccagagcaggcagcagggattcccaggtatccaaagaaaccaaaacaggcggtgtaatttaggactgactaagtaatggctcggccacttttaagtgtggaagcaaaactgaccccacagatttagaaaactgtaacactgcttattgggagaaactagtgtcaccctggctagttctgctccccaaattcaaaggtaaataaacggttgagcatgtccgatcagcctggagggaaacctccacccccgactttgtaggactgacatctgaagacgtcagagactgcggtcacaaccgtcggtacctccttagggcgcttaacagaggtcaaagatggccctcgcaccctcctggcgggagaaagcccaggctcagggtggtcttctacaccaccgcctctcccgggtccacttggaagcgagtcccagcgaactactcgacctaggaaaccactgggccgccacttccagcctcttcggaagtcgaggcaacgctcctgaacgttgccacgggaacagctggaggcgggcggatatgccctagcgttatctaggggctggcccggggaatggcgtgggggcggcggggccaagcaagcgccacctctgattgggcaaaaccccctcccctcacctgccaatagaaaccggcccactgtacagacgcgcaagtttataacccgggaagagctgctctcagagcggagggagaccatataaccctgggactctgccgtacctcctagaggaacagagcgcctctcaggcgtcagaggctgctgcaaatgcgggtcagcgggtcacggtcgcgcctgtcttgctgatgctcatgggaaatgtagttcaaagggcatgggcggtgccttcggtgcaggcgagagattggtcagcgcggcgtcgccggggcaacacccggctgaggcgccccgcgttgtgcggcgccacatccgggaagcggcctccaagcaaccgctccgggttgaggtgagcgcaggctgccagagtgggcgcagcctttccaccccgtgggagggcttggggtcgccctctggggcctgaacggctcctgctgtcggcgccctggagggcccgcccacttcccgacaggccgcgcgcgtcacctcagccttcgctcaggcctttcctaccctcaacgccgttccggggggccgggcctggcaagtcctcttggaacgcctccctcttgccttccccttttggggacagatcccgaagttcgagcatccctcggataggccgggtgtcaggcctggtctctcaggcccgtccaggtgggcgtctttcactgcagaccttcagggccgggatgctgtggccatccctcgactccgcgcaacgtggagctttggccccgtttttcttggcctttgcttttcgttttcacatgcacgggccccggcagtgtgagtcgcccacggctcgctgtggtcagcgagcacgatgtccacgtgccccctccccagagccattcctaaaggaggtcccacccagtcaacctccccgagattgtggagggcgactcgtccccgtacattacagcctggccccaccttctacccgcccaccctggtccactctcctcgcacctcggctagacactgtggctcctcagcctggcgctggaactctgtgatgactgtctttctccacctctttagcgtcatctcccagcagtcccctgctggacccaactgtttgcaatttccaggaagctccctggacaccttgcgtccaagcatttgtccctgaggcttcctcctgctctcatttgccatcattgtttgggtcctgtgaccctcctccttccatgaagctttcttggccttatctcttctggcctcagagtacacttggtcctggtctcagccccctgggctgagcctggtgtctgccttcccctggccagattctcttggctgacattccgacccttccttttctgtaggcccatcttgacgattccaagaccacccccttgagcaagaatgccatcccctctgggtcccccatgcctgcccgtcatggacccagagaccacccttgaggagcctgagactgcccgcctccgcttccgagggttctgctaccaggaggtggcaggtccccgagaagccctggcccggctgcgtgagctgtgttgccagtggctgcagcctgaggcacactccaaggagcagatgctggagatgctggtgctggagcagttcctgggcacactgcctcccgagatccaggcctgggtgcgcggtcagcggccaggcagtcctgaggaggccgctgccctagtcgaaggactgcagcatgaccctgggcaactgttgggctgggtgagtgtggctggcatcagcttcttggagggatagaccctggctagagccattgtgacctacctcttctcctcagatcacagcccatgtcctgaagcaggaggtgctccctgcagcccagaagacagaggaaccacttgggagcccccacccctcagggacagtggagtcccctggggaaggtccccaggacaccagaatagaggggtctgtccagctcagctgcagtgtgaaggaggagcccaatgtcgatggacaggaagtgggtgaggttggggtcccaccagagatgagggactcctggaggaagtgtggacattcctggctagggtgggagtcccaggagaggtgtgtcaaggctgggactcctgaagtgaatgtggatgtccctgtctgggatggggacctgggaggcaggagccaagggctggctacgtgccatgtcacacagcagaggagctcctcatctgccatggctcatgtgggcagcccctgacaccacccttccatctgccccacttttcagcaccctccagccctccacttgcagcacagtcccctgaggggaaccatggacaccaagaaccagcctccacatccttccacccacccaggattcaggtgagcagccccaagtgggaagtataggccccaggtgtgagaagggactgtccccatggctgccctctgcctggtggttttccaggctccttgactagtggctctttgcttcccagaagtggagtctgtaaaagctgtacccctccacaggacctggggcagagggacagactggtgatctattattgaaaaggatttggggctggacatggtggcttacacctgtaatcctagcactttgggaggctgaggtgagcggatcacctgaggtcaggagctcgagaccagcctgaccaatgtggtgaaaccctgtatctactaaagatacaaaaattagccagaagtggtggcaggcgcctgtaatcccagctactagggagggtgaggcaggacaattgcttgaacccaggaggcagaggatgcagtgagccgagattgtgccactgcgctccagcctggtcaacaagagcaaaattgtgtgtcaaaaacaaaaaaaaaaaaaaggatttgggcctcaagccatggaaacccagtttagagtggctggaactagtgggcttggcttcctcacctccagagaagtcagctgggaggtttgctgctcccagaggtcctgagccagacctggggatttgaacttttgtgtgtagctggggaggggagaagatgaccagctgtggcaggactccccccacacctgagaccagatggagacactctccctgggaaatgcccgaagtcccttctctcctaggggtttcttcagaggccacctgttaggcctggaagctcagcttgaggcctcttctacctggatcgcttggttcccaagtgtgggtagcaaggtcttttcctctcccggctcctctaacaactccactggggagcttcagcagcaacattgctggttgagatgtgtttcgaggctaagaagtccttccaggctccctccacagccccatggcacagtcagaaagtgaggcagggtgggtaggctgcacttcccagtgtcctcacctccagccagcaccatctctagctgtggctcctcacagctgccgccttcctgcccctggacttgccacagcttgtccctcaggattatttttcccaacccagcaaagccccagatgatgggactcaggcagcaaggagggctgacccccaatcagggagttcattcctcgataaagtcactcaggtccctgtgatgctgccaaacctgccctctgagcaggatggtgtagtagagggggatgagtgctggcagcagcactggtcaggtgatctgaaggagaacctctgcacttaacaaacacacaccttgagatcattctcagcaggaggggcagatgaggcgtaggtaacctgctgactcttccgggtaataggtaagaatgtgaaccagacagggcagggaaggggtggaaagacgcctacagtgatgggccacatccgcaggaggagtgggggctgctggaccggtcacagaaggaactgtactgggatgcgatgctggagaagtacggcacagtggtctccctgggtgaggaccagccagccccaccccgcccctctccctggggcctgcacccaccctgcagcaggcctagctgggcagggcctctgtgctaccagccctacccagctctcccaccttccagaggaacaccctgtcacctaccagaaccgaccccacccctccttcatgcaaaccccatgcctaactgtgccccccacccgggcagggttaccgccccaccagccagaggcacaggcccagtcagagctggggatgctgctcacggggacaggcgtctgcagaagcctgcgctcgggtgagtgccccacaccatccagcctgaatcacccctcctgtatcggtgggacctgagccacccactcatggggggacgggagcttgtgccacggccacaagcctgagggaggggttgctgagtgccgggactcacctggtttgcccctgcccccaggaaatgagagtgagggtccacctggctgcccagaggcccagccgccccagggcccagggccggcagcctgggagggcttgtctggggctgccactcctgcccccactgtgcgcccagggacaccgccagtgcccactcagcccacacctgcagagacgagactggagccggctgccacccccaggaagccctacacgtgcgagcagtgtggccgcggcttcgactggaagtcagtgttcgtcatccaccaccggacacacacgagtgggccaggtgtgcagtccccggggctagccaccggggaaagcacagagaagccaccacaaggggaggtggcctttccgcaccacccccgacgctcactcacaggcccccggagttacccgtgtgaggagtgcgggtgcagcttcagctggaagtcgcagctggtcatccaccgcaagagccacacaggccagcggcgtcacttctgcagtgactgtggccgcgccttcgactggaagtcgcagctggtcatccaccgcaagggccaccggccggaggttccatgagcagccagacagcacagtccctcggggcctcggtgttctcggggcctggatacagcctctggggcaccagcagaagactctggaggcagcaggggatgccagagtgaacaaggggtcccaagccagttccctgcccctggtctggtctcccccaaaagacctgggtgcaaggaaaaggagctgctctctctcttcttgcccctgcctcctagagggaggtctgggttcccttctatggctgaccagtgcctgtggggtgactgccaagcaccaggctccctccctccctgtgacatggcctgggctgacaacactccctctcctgggacctccttgcctcaggtgggtgttcaaaaactgtgccttcccactcgtctgtgcagaggctgggcctgaggtctcagtgtggagagcagcagaagacccaggaaagcacagttggcttccgtttctcctgctccctgtgtgtgttagaattttaacataaattccactttcataatatggagtttctgaataagaatcctgatttctggcttctgctggtcgggaaataggcagtttgctgtctctgcccagtagctgcagcacagggcagttgagcccagaacggccaaacctctgttgccacagaacccaggtcccaggtccccagcctcccttgctccttgccgcccacatcactcaccagcctcactggccttggaactcatcagtcccggcttgagagacacaaaggggatttcctttcgaagtacggctggacaagggggacctctgagaagaggggctgcaagcaggggttgcgccaaggccatgggtacttctaggtcaggccgcaccctccatagttagctggtcatgcagcaggaaggcaaaaggtcagctccctgggaagcaccggatctctgggcagtcactggggactcgccaatgcactgtattagttttctgttgctgctttaacaaacttggcagcttgaaacaacagattctcttatagctctgaaggtcagaactctgacatgggtcccactgggctaaaatcaaggttttgttttgttttgttttgttttgttttgtctgagatggagtctcgctcagttgcccaggctgcagtgcggtggcacaatctcggctcactgcaagctctgcctcccgggttcacgccattctcctgcctcaacctcctgagtagctgggactacagacacccgccaccacgcccggctaatttttttgcatttttagtagagacggggtttcaccgtgttagccaggatggtctcgatctcctgacctcgtgatccacccacctcggcctcccaaagtgctgggattacaggcgtgagccaccgcgcccggccaaaatcaaggttttaacaggactggttcctcttgaaggctctaggagagaataatccattttgttgccttttccagcttctagagtcagcccacgttcccccttttttttttcttggtccattcctccgtcttcaaagccagccatggttggtcacgtcttccttaggctgccagctctctgacacccatcgatcctttggcctccttaaggaccctcatcatatcttgtcccctacctgcacacttagtcacaccgcagagtcccttttgccaattgagatgttcacagcttctggggattggaatggggactccttgggggccttgattcagcactcttctccttcctactctgaaaacaaggggcattttcacaggggatggtttcaggaaatgggtgccctctcggaaggagccctcgccagctgctggtatgtgcagcatgtgcacaagtcgcaggtggatgttgagggtagctgcgactgtggttaccccaggaggggctccctgggaggggcaggaaccctgctgcggcctgaagctgggagagggaggctctcctcagaggcccatcttccccatccccttttatgagggccttctaacccgttgctcccatgtgcagggctccggaagcagggccagtttggagatggagctgggggtgggtgatctgtgagcaagcaggaggcgagagctgtgctggggacagagaagaagaagacagagcagtacccaggggctccagctaggccccagcccagaagggagagtcagggtatagaaggctgtgaaagggccagatcatgcaagaaaagctgcagggggtgagggcagtttttaaataaactttttcacatttagaagcaatttatgctcacttagaaaaatttgaaatacacaagatggcaaagaagatcatgaaaatgttccctaattcaactgtctcatggcaatgcttactccagaagtttacatatagaagtggttgaatgtaaagtttcttttaaggcaacttatgttgtttcactttgggagaccacgagttcaagaccaatctgggcaacatagtgagaccttgtctccaaaaaaaaaaaaaaattaaaaataatagtaggctgggtgtggtggctcatgcctatattcccagcactttgggagaccaaggcaggtggaccacttggagttcgacaccagcctggccaacatggtgaaacctcaactgtactaaaaaaaatacaaaaattagccaggtatggtgacatgcacctgtagtcccagttacttgggaggctgaggaataagaatcacttgaacccgggaggcagagctgcagtgggccaagacggcgccactgcactgcagcctgggtgacaaagcgagaccctgtctcaaaaataatactactactaattagccaggcatagtggcgcatacctgtagtcccagggagactgaggtgggagaatcacttgagcccaggaggttaaggctgcagtgagctctgataacaccattgcactccagcctgggcaacaggatgagaccctgtctggaaaaaaaaaatacggaaatgggagacggaagggtaggtcagagagagggatgatggatgaaataactgcaaatattcacaataggagagggatgaccccaccatatggaatgcttcacaaatttgtgtttacccttgcacaggggccattctaatcattccaattttagtgtatgtactatagaagtgagcgagcagttaacttttttcttttcatgcctggatgaatctattttctggctggcaccatcatttctaccaagaccaaagaatttcttgttccctcctcaccctgcagtacccagtgctatgattaattctcttgagtaaacacttggatactactgtggctatttctgtagtataaatttctcaaaatgggattggtgagttacagggaacatgagatttatttttgccttaaaacagcaaaaacttattgtacaattctggagaccggaagttagacaccatctcaccaagctaatactagagtgttggcaatggctgggcacagtggttcactcctgtaatcccagcactttgagaggctgaggcaggaggatcacttgaggccaagactttgagaccagcctgggcaacagagtgagaccccatctctaaaaaaaaaaaaaaaaaaaaaaacacacaattaaaaaaaatttttttagctgggtgtggtagtgcacacctgtagtcccagctacttggaaggctgaggcaggaggatcacttgagtccaggaggttgaggctacagtgagccaagatctcacgactgcactccagcctgggcaacagggcgagactccatctcaaaaaaaaaaaaaaaaagtgttggcagggctgcattccttctgtaaacactagggggaaaattgttctgtagctcatggccccttcccccatgtggtggctcacacctgtaagcccagcactttgggaggcaaaggcgggcggactgcttgagcccaagagttcaagaccagcctgggcaacatagcaagaccatgtctctactttttttcgataaaattttttttaaaaaattttaaaaaccaatcagccaattttccccaagttaatctataaagtaaatgaaatgcaaataaaatataccacatttcagccgggtgcagtggttcactcctgtaattccagcactttgggaggccaaggcagggagattgcttgagcccaggaattcaagaccagcttgggcaacatggtgaaactccatctctagtaaaaatacaaaaattagccaggtgtggtggtgcacgcctgttgtcccaactactcgggaggctgaggcaggaggatcacctgagccttgggaggcagaggctgcagtgagccatgatcgtgccagccggagcaacagagtgagaccctgtctcagaaaaataaaaagaagcacattttatatgatccaacaaaaagattctaaaatgcatgtggaaaagtccaagaattgctaagacaatttggaaaaaacgacaagtagggaagaattgtcatattgtaaataaaaacactgttaagttatataatattaaaatagtgtggtggctgggcacggtggctcatgtgtataatcccagcactttgggaggccgaggcgggtggatcacctgaggttggagttcaagactagcctggccaacatggtgaaagcccgtctctactaaaaatacaaaaaaaaaaaaaaattagccgggtatagtggcacacgcctgtaatcccagctactcgggaggctgagacaagagaatcacttgaacccagaaggcagagattgcagtgagctgagatcatgccactgcactccagcctgggtgacagagtgagactccatctcaaaaaaataaaatattgtggtattggcacaggagtggacaactaggtcaatctaggaacagaccttttggaacttgatatacatgaaatgactcaaccaatcagtgaagacagggtggatgttcactgaatattggagaaaactgaactcccccatacaaaagaaaacagatttccactttacacacactcaaaattaaattccagattaaatactaggatatttttaatgatttattaaatttttttttggtagagacagggtctcaatatgttgctcagcctagtgtcaaactcctagcctcaagcaatcctcccttctctacttctcaaattgctgggattacaggctgagccaccacacccagcctgatatttatttttaaatatcaggaaaatgtaaaactttgttttgtttttgtttgttttgagacagagtctcgctctgtcacccggggtgaagtgtagtgtgaacatggctcactgcagccttgacctcctgggcacaagcagtcctctcacctcagcctcctgagtagctgggaccacaggcacatgccaccacactcagctaactttctttttttttttttttttttttttgagatggagtcttactctgtcacccaggctggaatgcagtggtgtgatctcggctcactgcaacctccgactcatgggttcaagtgattctcctgcatcagcctcccgatagctgagactacaggcacgtgccaccacgcctggctactttttgtatttttagtagatggggtttcaccatgttagccaggatggtctcaatctcctgacctcgtgatccacctcggcctcccaaagtgctgggattgcaggcatgacccaccattcctggcccacactcagctaactttcagtttttgtttgtttgttttttgagacgaagtctcgctcttattccccaagctggagtgcaatggggtaatctcggctcactgcaacctccgcctcctgggttcaagcgattctcctgcctcagcctcccgagtagctgggattacaggcccccgccaccgcacccggctaatttttgtatttttagtagaggcggggtttcaccatgttggccaggctggtctcaaactcctgacctcaggtgatccgcccacctcggcctccccaaagtgctgggattacaggcgtgagccaccgcacccagcttttttttttgggggggggcggggagagatgaggtctcgccatgttgcccaggctgaaagtaaaaattttatgacctcaagagttgaaaatgatttcttctttttatttttttgagacggagtctcactctgtcgcccgggctagagtgcagtggtgcgatcttggctcactgcaagctccgcctcctgggttcacgccattctcctgcctcagcctcctgagtagctgggactacaggtgcccgccaccacacccagctaatttttgtattttagtagagacggggtttcaccgtgttagccaggatggtctgaccttgtgatccgtccacctcggcctcccaaagtgctgggattacaggcgtgagccactgcgcctggccgaaaatgatttcttaaataataacacaaaaagtatacagacccctaaaaccctgccaataacaagtattggttaggcagcacagaacaggacctgtgaatttgatgagttatcactcctgtgatttgatgatgtcatatggcatagttgcccttgttttgttttgctttgttttgttgagacagggtctcatttgttgcccaggctgcagtgcagtggtgaaaccataggtcactgcaacccggaactcctagtctcgagcaatctgtccatctctgcctcacgactaaagaaacaactggcaagtttaataaatcgaacttaaatctctgaaaagacactgtaaacataaataaaagataagcaaaatattggaggaaaacataaaccaaaaaaaccctcgacaaacccagaaggtatttttaaactccaaataagtccaggcgcggtggctcacgcctgtaatcccagcactttgggaggtcgaggcagggggatcacttgaggtcaggagttcaagaccagcctggccaacatggtaaaaccccgtctctactaaaaatataaaaattagccagccgtgatggtgggcgcctgtaatcccagctactcaggaggctgagacaggagaatctcatcaacccaggaggtggaggttgcagtgagccgagatcacgccactgtactccagcctgggcaacagagcaagactctatctcaaaaaacaaattaactacaaataaatatgaataggactaaaatatgatagaaacatggagaaaggccataaggcaggaatacacatcagaagaaactaggctgatagaccagaaagaaaatatgcttagcattacatgcctagcagtaatcagagaaaccccagcactgtgaggacagggcttcacctgccttgctcatggccacacaccctgttcatggcactgtgagggcaggacttcacctgccttgcccgtgaccacacaccctgttcatggcactgtgagggcaggacttcacctgccttgcccgtgaccacacaccctgttcatggcactgtgagggcaggacttcacctgccttgcccgtgaccacacaccctgttcatggcactgtgaggacaggtcttcacctgccttgctcgtggccacacaccctgttcatggcactgtgaggacagggcttcacctgccttgctcgtggccacacaccctgttcatggcactgtgagggcagggcttcacctgccttgctcgtggccacacaccttgttcatggcactgtgaggacagggcttcacctgccttgctcgtggccacacaccctgttcatagcactggttggtattcgtagcattgtcaacaaaccagatacacatcaatataacgtgatggatttctcagccttcaaaatagcaagttaaaaaccctgccaattaaaagaaaaggcataaacatgactatgataaaaaaaaaaaaaaaaaggctgggtgcggtggctcacacctgtaatcccagcactttgggaggccgaggcaggtggatcatgaggtcaggagattgagaccatcctggctaacatggtggaaccccgtctctactaaaaatacaaaaaattagccgagcttggtagcaggcacctgtagtcccagctacttgggaggctgaggcaggagaatggcgtgaacccaggaggtggagcttgcggtgagccaagatcacgccactgcactccagcctgggtgacagagcaagactccgtcaaaaaaaaaaaaaaaacaaaaaaatacaaagtgccaatagcaggtattggtgaggaaatgaataccaggacctgtgcatatgatgagctactgaaactgcctttgcaaaattatgactaagacagtgaaagagatctgactaaatcaattccatcttgcttctaacctctaagctgtcctagttcattcttgggcataggctgaagtaactttgagagaaacttatagttcataaccttatggtttatagtttaaaacacagaggataacagccctttcccaaagcagacctccttcttgcctggggaccagatggcctttgtaggactaacattagccccaagattagaaactctggtttaggagtcacgcagctggaggctagaagattctgaccctccctcaactgctcctaagatcagcgcttgggatattttgcagactctgcacttgatggatcagctggccccacccagatccataaaatggctcatctgatcttgtggcccccaggaactgactccgcgcaagacgacagcttcgactctgtatgatctcatccctgaccaatcagcactcctggctcactggcttcccccaacccaccaagttgtccttaaaaactctgctccctgaatgctcagggagactgatctgagtgataacaaaacccttgtctcccgcacagctggctctgcgtgaattaccctttctctactgtaattcccccgtcttgagaaatcagctgtgtccaggcagcaggaaaggtgaacccactgggcagttacgctaccaatcctgtgatatgattgtgtcacatggcatggttgcccttttttctttttgacagtcttgctgtcactcaaactggagtgtggtggcgcgatctcggctgactgcaacctccgcctcccaggttcaagcaattcttgtgcctcagcctcccaagaagctggagtacaggcccacgccaccacgcctggctaatttttgtatttttagcagaggtggggtttcaccatgttggccaggctggtcttgaactcctggccttggcctctcaaagtgctgggattacaggcatgagccaccgcaccagccgtagttttgttttcttgagacaatctcactctgtcacccaggctggagcaaagtggtagagtcatagctccctgcaacctagaactcctgggctcaagtgaccctcccacttcagcctccccagtagctaggacaacaggcacgtgccaccagacctcgccttttttttttttttttttttttgagacagagtcttgctgtgctgtccaggatggtctcaaatttctggcctcaagtcatcctcctgcctcagccttccaaagctctcagattataggcatgagccaccatacctggccccatagttgaacttaaaatagactatatgattatctgggggtgtgggggggctgatctagctacatgatcccttttaaaacatggagctcttggcgggcatagtggctcacacctgtaatcccagcactttgaaaggccgaggcagtcggatcacccgaggtggtcggatcacccaagatctataatttgagaccagcctggccaacagggcaaaaactcatttccgctaaaaatacaaaaattagccgggcatggtggcacgtgcctgtaatcccagctacttgggaggctgaggcaggagaattgcttgaacccgggaggcggaagttgcagtgagccgagatcatgccactgcaccctagcctgcgtgacagagcaagactccatcttggaaaaaaaaaatacaaaaattaggccaagcgcagtggctcacgcctgtaatcccagcactttgggaggtcgaggcgggtggatcacgaggtcaggagatcgagaccatcctggccaacatggtgaaaccccatctctactaaaaataaaaaaattagccaggcgtggtggtggacgcctgcaatcccagctactcaggaggctgaggcaggagaatcgcttgaacctgggaggtggaggttgcagtgagctgagatcatgccactgcactccatcctgagcaacagagcaagactctgtctcaaaaaaagagaaatgcctatttttattttttttgagacagagtcttgctgtgtcgcccaggctggagtgcagtggcatgatcttggctcagcgcgacttccacctcccagattcaagcaattctcctgcctcagactcccaagtagctgggattacaagcacaggccaccacgcccggctaatttttatatttttagtagagatggggttttgccctgttggccgggctggtctcaaactcctggcctcaagggatctgtctgcctcaccttaccaaagtgttgggattacaggcgtgagccaccactcccggccccatacatttattttaaagtaaatttccacatcttgcaataataaaataaacagtatttcaagtcaccttaaaatagataatgtctacattaatagatgttcatccacacagccccgtttatcacctggaaccatacttgagaagtcctgcctaccagtgtccatcaccagctccattcctctgtagttggtgccatctgcaagaatcgagccccttcctggggtttgcacaggctgcagcctcctcctactacagcagatgccaaagggcactgggcatggtgtgggggtcagttcactttcacacagggcttgtgttttccgtggtctcggcaacaccaacagtgtctgaacatgactgcacagacattggtgcccgccgctgcttgtgagctccaagaccatctctccttctgtgggtgccccacttatctcactttttgacccctccccaggtctctggaaccctctcttcagtcttgacttcctgctggcctgtctggaccaggtctgtcagtcctactccccagcaccagatgggccctaagaatccccctcctgccacacctgctatttcctcatatccagcctctcaggctacgatcaccacgccacccttccagaaggttccttccaaccgcccttccgaaaaggccctctccatggccctcttgtcaatgactcactcccagcatggacagcagagacgtgacccacacctctaacccatgaggctctgcccagccctccctggacatgtcagaaaacagagagaccctagtcactgtgggtccagaggcaggaccagcagccacgtccatgccttttcagagcaccctcaccagggtaaggcaagttctagcaaggcagagagggatctgtgtgaggaggtacctctcattaccaccactgttaatcatcattgacttattcattcatagagaaaaagtcatcttgaaccatcaaacccgagagcataatgtcggatacggaaagtcggtgggagaagtcatctgtcattaggggtgggagcggggaacttaacacgggcatccaggaaaaggcaggatgagaagaaaccgtggacttggtaaagtctgtaagaaacgtcaccatctgagccatcgctacagcatctgcctgtatttctcacatgcttacatgaaaggcattatttattcacttggacaacaaaggctgcttttcgtgagagtcactggtcctcccatgagggcatccaccgatacttcaagaatccttcctggggccgggcacagtggctcacgcctgtaatcccagcactctgggaggctaaggggggggcggatcacgaggtcaagagatcgagaccatcctgggtaacacggtgaaacctcgtctgtactaaaaaatacaaaaaaaaaaaaattagccaggcgtggtggcgggcgcctgtagtcccagctactcaggaggctgaggcaggagaatggcgtgaacctgggaggcggagcttgcagtgagccgagattgcgccactgcactccagcctgggagacagagctagactccatctcaaaaaaaaaaaaaaaaaaaaaaaaaaaggaagaaagaaagaaagaaacaatccttcctaggacagtgaatcactcctataatcccagcactttgggaagctgaagcaagacgatcgcttaagcccaggagttcgagaccagcctgggtaacacagtaagatcccaactctacaaaagaaaatatgttttttttaattagcaaggcatgatggtgcatgcctgcagccccagctactgggggggatcacttgagcctaggaggtcaagggtgcagtgagcgatgatggtgccactgcactccagcctgggtgacagagcgagaccctatctcaaaaaagaaaaaaaaaaacaaaaaaaccagtccccacactagcagccacccataagaatataaagaaagcatggtgccctccaccaccttttacttctatacctaaccagcaattttggggggaaaagacataaatgggaaagagttctgacacatgactagctaagaaggttttgaaataaaagtaaagagtaggaattccgccaggtgcagtggctcacacctgtaatcccagcactttgggaggccgaggcaggtggatcacctgaggtcaggggttcgagaccagcccggccaacatggtgaaactccatctctactaaaaatacaaaaattagccaggagtggcggcatacacctataatcccagctactcaggaggctgaggtgggggaatcgcttcaacttgggaggcagaggttgcggtgaactgagatcaagccactgcactccagcttggacaacagagagagactccttctcaaaaaaaaaaaaaaaaaaaaaaaaagagagaaagaaaaagaaaaaaaaaaaaaaaaaaaaaatatatatatatatatatatatatatatatatatatattacaagcctatgctaattacagcagcttgggacaggagaaacagaaagacttatagaatgaaattaagaatacgctgggtgtggtggctcacgcctgtcatcccagcacgttgggaggccaaggcgggcagatcacctgaggtcaggagttcgagaccagcctggccaacatagtgaaaccccatctctaccaaaaaaatgcaaaaattagctgagcctggtggcacatgcctgtaatcccacctactcaggaggctgagacaggagcatcacttgaacctgggaggcagaggttgcagtgagcccagattgtgcaactgtactccagcctgggtgacagagtgagactacgtctcaaaaaaaaaaaaaaaaaagggtgcagtggctcacacctgtaaccccagcactttgggaggccgacgtgggtggatcacgaggtcaagagttcaagaccagcctggtcaagatggtgaaaccccgtctctactaaaaatacaaaaattagtcaggtgtggtagtgtgtgcctgtaatcccagctactcaggaggctgaggcaggagaatcacttggttccgggaggcggagtttgcagtgagccaagatagtgccactgcactccagcctaggcaacaagagtgagactccatctcaaaaaaaaaaaaaaaaaaaaagaagaataaaatgtgtgtcaccagcccccagcacatcccctccacaatagtagagtgtagggtagggctctgcctgctcatttcgccccaggaggccaaccctccctgatagtccaggatatttttggaaaaaaaaaaaaaaggtgcttttccgtctccccaagatcctcaagttcaactagacatttcctatataaatgttttgttctgcctgttcattttggtgggtgcccttttctcccttccccaccacccgtgctcctcccagtctgcccctggcctccagccctgaggatcagttgaggtagggtccctggtattccgtaccctcctccctttgtttctgttggttgtcactcctgctgaatgtattgctttttaatactgtactgcaggttttttttaaataaaattgtttggaaagtaaaagagaaaaggaataacgtgtgtgatatattgaataaaaaacacttcatagatctgtagtctagtgggggaataagaaaaagttttaaaatttttatttattttagagacagggtcctgcctctgttgcccaggctggatggagtgcagcagcacaatgatagctcactgttacctcaaactcctgggcttaagccatcctcctgcctcagcctgcccagtagctaggactaaaggtgcacaataccactcctggctaatttttttacttttaattttttttctagagacgtggtctcactatgttgcccaggctgatcttgacctcctagggtgaagtggtcctccgaccctggcctcccaaagtgctaggattacaagcatgagccactgcacccagccaaaaattatattattatttaaatttatttatttatttatttttattttattttttgagacggagtctcgctctgtcgccaggctggagtgtagtggtgcaatctcagctcactgcaacctctgcctccccagctcaagagattctcctgcctcaccctcccgagtagctgggactacaggcatccgccaccacacccagctaattttttgtatttttagtagagacggggtttcaccatgttggccaggctggtctcgatctcttgacctcatgatccacccaccttggcctcccaaagtgctgggatttcaggcctgagccaccgcgcccgcctatttattttttctgagacggagtcttgccctgtcacccaggctgcagtgcaatggcgccatctcagctcactgcaacttttaccttctgagttcaagtgattctcctgcctcagcctcctgagtagctgggattacaggcatgcaccaccacacctggctaattttttgtatttttagtagagacggggtttcactatgttggccaggctggtctcaaactcctgacctcatgatccactcacctcggcttcccaaagtgctgggattacaggcgtcagccactgcacccagcctcaaaaattattattattattttgagacagactctcagctctgttgcctaaagtggagtgcagtggtgcaatcttggctcactacaacctccacctcccaagttcaagcgattctcctgcttcagcctcctgagtagctgggattacaggtgcataccaccacacccagctaatcaaatattattttttaatccttgcaaatgtaatagcaaaaactatgaatgccccaagctagctagggcttagggaggcacggatttgtataaagtgctggtgaacttgtaaagctgaggatccacagtgagatatttctacaacatccacaccctctgatccaacacctgcaacaatgggcttggcaagtaactcatggggaaagcacctctcttggctggggcttcctcaactatggtgggagcaacacaacacaactcatcccatgagatgtggtgaagatatcagctctaggccaggcacagtggctcacacctgtaatcccagcactctgggaggccgaggtgggaggatcatgaggtcaggagatctagaccatcctggctaacacggtgaaaccccctctctactaaaaatacaaaaagaaagccgggcgtggtggcgggcacctgtagtcccagctactcaggaggctgaggcaggagagtggcatgaacccgggaggcggagcttgcagtgagctgagattgcaccattgcaccacagcctcggtgatagagcgagactctgtctcaaaaaaaaaaaaagtatcagctctagcctggccccaggtgagtccacaagggttattcttctttttttcccactatactaacaaggacgtgagggttcttttttttttttttttttttttttgagacggagtctcactctgtcacccaggctggaggagtatgaaggaactggacaacctactgtgtgcgtgggaggatccaagtccagttgtatgaaagggccagggctcttcagggaacatgtggggctccactggccacacagggcacagaaatagcaagtcacaacaactatcacttcgcagaagagaattacagtgcacggccaccaccaatgacaaacagatgctcatagtgggaccccaactgaaaaggatactgtctcagctccaggctgcagggctgacaggaagagcctcgaatgctaccaggaactctgtgaagcccagctgcctcacagcccacgtggggtgctgcctgcactgctcccttcgaaggctagttctgtctcaaagtggcccatagcctgatgaggaggctgaggcacgggagagcacagtattgtgccaaacccctactgactccaatggggacggcaccaggttcaagaggccgaagaagagactaagagccagcaaacaagatgtagggttttactgggggcttacataccggggagagtccaggggcggtgggctgggcaggagaaccacttgcaaaaagcatgcagtttatatggcattttcacttaacatcctccccctggcaaccttcatttaactgaaagcaaaaggccaggatcccttataccaccagcattccatgggacagggctaaggacccagatgttcctcaaaaataaggaatgaatctctgagattccttagctgggaactctgaaccacactcaggtgcgtctgccacacagggccattctcaggtgtgcttaagcattgctgtggggtgtgtttactatgcacacgagaagggatgggcagggtcgcagtctgcagcactgcccacggacagccctttgcatatggcgtttactgctgtggggttccttttctcaccatcatcaccccagctgtgctcccaaagttaacccatggaccaccggcctggcaccaccacaactgttccagtgtctgtagcctcaccttcagttcctactgggccgagaagccttggaggcagaggctcagcacccacacacccccacctacatctccactaggcttcgggtagcaggtccaactcctgagactgtgcagactcccattttccagaggcctctgctcccactgctccccacctacaaagcttgccccagggcctctacacgtgccgttcacagtgccagggacactcctcccccagttacctcctgcttgcccttctagcctcagtccagcaacctccaggctttgtcagattgtgtatccacagcacttcacaggggagttatccacatccactggcccagccaccgcctcagtggcccaccaaagacccacagatgagaatcagagttctcatctctctacctcagagcagctgcgaggctggccagctcctcccacacccttggcgttacacagacagggtcatcccacagggatggctgaggttctttgctgggagacagggaagaccctaaaataaggtcttcagggcactagcccctgcactcctccattgctccttcatccacgcagacatacagacttctgtgaacacatctgagtttattctgccactgctacagggcccactgtcatttccagcccactgaggttgagggtatggccaggctgggattcacacaggcccaggatgaaagggacaccgagtgtgttggggtgggggtggctggctttgatccctaccccagtgggttggccaggtgatcagagcctccaggttccctcacacacagcctggtacatttctgccgtcaggggccggaaggactgggcccggttgtccagtacaaacagagggtcaaccacgatccccacattgaagccctcacgcaccaaccgggtcttcatcagtttgaacgtgctggtgacctccatggcgtcctgcagggcagtgaccatggtccaatcactgtgacatccacccgccccctggctatgatcttccacccacccaccaggccaccctgggctcacctggatgcggatgaaatggggggtagcgtaggcagggagccaagcgcgaacgtgctggtacaacttctccccgtcgaaagtctggccgggggctagctgcacagcagccatgcccaccttaccctcacaacctagagagcagtctggtcactctcggctgacccatctcgagggcccatagctgaccctccagcctcgcccagctctgctcactggctgtgagagccagcaagtctctaaacctctctgggccctagcacttccccacctgtaaaatcagaataacgacccctccacccacaaagctgttggaagtttaaaatgagaaccctccgcacctggcacgcacacgccatacacgttaacctgttgcaagaagtccacctgcgacaacacgccctccacctcgtgcgtggacacgttctcgcccttccatctgcaaggagggagccggcgcttgtgaccacgcccccgggaaggagaggccccgcctcttgcccccgccccgccccttttggggatcaggaggcccagtcagccccgccccctcgaaaatcgagaagccccgccttcgcgtgagaagtcctgactccaagttccgccctcttacgacaggaaagtcccgcctcttcagcctgactccctctaggatctgaaagcgtccgtggccccgcgccagccccgccccgagaaaccctgcctcggaccggaaggtgtccccgaggcggtcgcggaagtagaggaagccttcgcggtccatggccagtacgtccccggtgttgtagtaaacgtcgcccgattgccgcacgttgcgcaccagcttccgttccgacagctctcgggggccgcggtagcccacgaagggttgctggcttaccaccttggtcagcagcagccccggctcccctggggtaggagcaggaacaagaacccctggagcccaccagccaagccccctgctggaggttttcaacaacggtggactcttcatcacccagcaccctgccaaggacagacccaaagacacagacagggagatccagagatgagagagacattcagagaccttgagagactgcgacaagcgacacagaaaatgagagagaagtatagagaaggcggtatggggagcccatgagaaacaggaaaaggataacaagggatggaagacggacagacaaatggcagtgagaatagatatgaccaggaccttgcaaggccctgggagaagacactaacagaaggtacaggacaagggaccaatggctggaatgccgtcttccacagaaagctcaagagaacaaatcagatggacacccagagacccagtaaatcagagcaagagatcaaggcaggggagctggacagagccgagaagctgaggcggaggccccagatggtggtaaggcaggccactggctcagggtccagatgaaggctgcagacccctctagtgagcaccaacgtcaagcttttgagcagctcgttccagccaagcagaagactgagggtcgccacccctgccacccaggaaaggctcctcaacccccatacctagccctacagggatgcagaagccctgattgtccctcacaggctccgccgcctccatgtcgaactgcaccagctcaaagggggacagcatctggggtggagggtggagtgttgacataggtcctgtgggctcagcctcagggcagctgcacaccaggtacccgcacactcactcggaggaggcagctcatcttgcccagggccccgcagcgccccacatagttgactaagcccatgttgccttctgtggagccgtagacttcccagatccgaataggaccgaagcgctgctggaaggtctcccacacatcagcccgtagtccattgcccattgccaggcggactgtatgtgtccggtcctctggttgctacaggaatgtccccagaagggtgaggaggaggtgctcttggggcatgccttggaacctttacctagagggggtgttatcctgggtccttaccttgggagttacctggaaggtgatgggggacctctacctaagggatctacctgggttacttacatgagagtagttactggagtcttaaatagagggttacctgcaggggcgacctcagagctttgcctgggggacgttaccagaggtgactggaggcctcatctggggtctcacctaagagtagttacctagaactttaatttaatggaaatttaattttaattaattaatttttaatggaaattctcatgataggggtaggggctattatccctgttttccaaatgaggacactgaggctcaaggtagcacagctatcaaagaaaccattattggaagccttgtctgaaactcattatctggggttcttgcatgaggtgtattatctgagggacttgagttcagtacctgaatctttacctgagacctttacctgggatttcatacttgggtgttcaccatggagccctaatcttagagcctcacctggggaatgttacacaagtaccgcaggagctcgcccacatacaggatcactgtcacgccatgctgccgacagtcatcccagaagcaggaagtagagaacttgggggccagaacacaggtggctcctgggagatgacaggagagggggtttcaggtcatgcttccaaattgttgtaagaagctgcttttagcacctgtgctcacccacccccacaccctgaaatacaggacaatactgagttcatctttgtgtccttggcccagccaggactgctctcactagaagagcataggcaggcctgggttcaaatcctgtctccaggatgccgggaaagctccgtgcctgttataaagtgagcaatgctaaataagggctgtaaatattaaattttttatttttatttttgagacggagtctcgctctgttgcccaggctggagtgcagtggtgcaatctccgctcactgcaacctctccctcccgggttcaagcgattctcctgcctcagctttctgagttgctgggattacaagcacccgccaccacagctggctaatttttgtacttttttaagtacagacggggtttcaccatgttggccaggctggtcttgaactcctgacctttcaggtgatccacccgcctcggcctccaaagtgctgtgattacaggcatgagcctctgtgcccagccacatttttaatttttattttggcttgtcactgactcgaagctcaaatcactcttgattacgataaatgaatgcccagctaagcagatgggtgggcaggtggatggatatggtggatggatggaaagatgaatggatggacagttagagtagtgagtgagtagatgggtgggtggacagagtagtgagtgagtagatggatgggtgaacagttagagtagtgagtgagtagatggatgggtggacagttagagtagtgagtgagtagatggatgggtgacagagtagtgagtgagtagatggatgggtgaacagttagagtagtgagtgagaagatggatgggtgaacagttagagtagtgagtgagtggatggatgggtggacagttagagtagtgagtgagtagatggatgggtggacagagtagtgagtgagaagatggatgtgtggacagttagagtagtgagtgagaagatggatgggtgaacagagtagtgagtgagtagatggatgggtgaacagttacagtagtgagtgagaagatggatgggtgaacagttagagtagtgagtgagtggatggatgggtggacagttagagtagtgagtgagtagatggatgggtggacagagtagtgagtgagaagatggatgtgtggacagagtagtgagtgagaagatggatgggtgaacagttagagtagtgagtgagtagatggatgggtggacagttagagtagtgagtgagtagatggatgggtggacagttagagtagtgagtgagtagatggatgggtggacagttagagtagtgagtgagtagatggatggctggacagttagagtagtgagtgagtagatggatgggtggacagttagagtagtgagtgagtagatggatggctggacagtgacatgcagaggcaggggggtagaaagatggataggtggctgggtgaggatcgtcacgcctgtaatcccaggacttagggaggccgaggtgggcggatcacgaggtcaggagatcaagaccatcctggctaacacggtgaaacccgtctctactgaaaatacaaaaaattagctgggcgtggtagcgggcgcctgtagtcccagctactcgggaggctgaggcaggagaatggcgtgaacctgggaggcggagcttgcagtgagccgagatagcgccactgcactccagcctgggcgacagagtgagactctgtcttaaaaaaaaaaaaaaagaaaaagagaaagatggataggtgtaaggatggatagatgggtgggtggatgaatgaatgaatgagtgaggaagtaggtgagtaggtagatgggtgggttggtgaatgtttgtatggttgtattgacgtatggacacatggattaataagatatagggggctgggcgtggtggctcacacctgttatcccaacactttgggaggctgaggggggtggatcacctgaaagatcaggagtttgagaccagcctagccaacatggtgaaaccctatctctaccaaaaaatgcaaaaattagccaggcgtggtggcgcacacctgtagtcccagctactcgggaggctgaggtggaagaatcgcttgaacccaggagggggaggctgtagtgagccgagcttacaccactgcactccagcctgggtgacagagtgagaccctgtctcaaaagaaaaagaaaaaaactgaatctaacaacacctctagttaaagtttccaatttaacaagaaatgcagatgaaaggggaacagagacctacaagcaaatacaatggggagactgtttaattgttaaaaacaaacaaacaaacaaacaaacaaaaaaacagccaattggctgggcacagtagctcacacctgtaatctcagcactttgggaggccaacgtgttcagatcacttgaggccagaagttcaagaccagactggccaacagggcgaaaccctgtctttactaaaaatacaaaaaaattagctgggcatggtggtccacacctgtaatcacaactgctcaggaggatgaggcatgagaatcgtttgaacccaggaggcagaggttgtagtgagccaacatcacacaactgtactccagcctgggtgacaaagcaagactctgtctctaaaaacaaaaccaaaccaaaacagcccattggagaaatctgaacatagactggacatcatatgatattaaggggttacatcatatgatattaaggacatcatatgatattaatgttgttacgtgtaataatcactttggttacagtttcttcagtgcttatatgttagagatatgtactgcaatatttacaagcataaagatgcagtgtctaggatttgctctgatatattctggaaaaaaatagggaagtggctgggcacggtggctcacgcctgtaatcccagcactttgggaggccgaggcaggtggatcacctgaggtcaggagtttgagaccagcctggccaacatggcgaaaccctgtctctactaaaaatacaaaaattagccgcttgtggcggtgcgtgcctgtaatcccagctattcaggaggctgaggcagaaaactgattgaaccctggggggggggggggggcgggcggggcggagcttgcggtgacccaagatggtgccactgcactccagcctgggcgacagagcgagactctgtctcaaaaacaaacaaacaaacaaaaaagaaacagggaagtacatgtgaaattaaactggccctgggcgcggtggctcatgcctgtaatcccagcactttgggaggccgaggcgggcggatcacgaggtcaggagattgagaccatcctggtgaacaccgtgaaaccctgtctctactaaaaatacaaaaaaaatagccaggcgtggtggcggtcacttgtagtcccagctactccggagacttaggcaggagaatggcatgaacccaggaggcggagcttgccgtgagcagagattgcgccactgcactccagcctgggcgacagagcgagactccatctcaaagaaaaaaaaaaaaagaaattaaactggcagcatgttaacaattattgaagctgggtgaagatacctgagatgtcatcaaactattttcacttttttttttttttttttttgagacagagtctcgctttttgcacaggctggaatgcaatggctagatctcggctcactgcaacccctgcgccccgggttcaagcgattctcctgcctcagcctccctggtagctggaaatacaggcgcccaccaccatacccagctaattttgtattttcagtagagacagggtttcaccatgttggccaggctggtctcaaactcctgacttcaggtgttccgccggcctcagcctcccaaagtgctgggattacaggcgtgagccaccatgccccggtaatttttgtattttaggtagagacggattttgccatgttagccaggctgatcttgaactcctgacctcaggtgatccaccagactcatcctcccaaagtgctgggattacaggcgtaaaccactgggcacagcctaaacttttcataattaaaaaaacaatttggccgggcgcagtggctcacgcctgtaatcccagcactttgcgaggctgaggtgggcggatcacctgaggtcgggagtttgagacaagcctgaccaacatggagaaaccccatctctactaaaaacataaaaaaaaattagccggtcgtgagggcacatgcctgtaatcccagctacttgggatgctgaggcaggagaatcgcttgaacccaggaggcagaggttgcagtgagccgacatcgcgccattgcattccatcctgggcaacaatagtgaaaccccgactcaaaaaaaaaaaaaaaaacatttggccgggcacggtagttcacacctgtaatcccagcactttgggaggccgaggcgggcggatcacgaggtcaggagttcgagaccagcctggccaacatggttaaaccctgtctctactaaaaatacaaaagttagccaggcacggtggtgggagcctgtaataacagctactagggaggctgaggcaggagaatcgctcacaagtgctcaccaccatgcctggcttttttttttttttaacagatggactctcactatgttgcccaggctggtgttgaactcctgggctcaagtgatcctcctgccttggtaccccaaagtgcagggattataggcatgaggaaccacacctggccatgataaaagtttgaaaacaaacagacgccaggcgcggtggttcacgcctgtaatcccagcactttgggaggccgaggtaggtggatcacctgaggtcaggagttcgagaccagcctggccaacatggcaaaaccccgtctctactaagaatacaaacattagccaggtgtggaggcgcatgcctgtaatcccagctactcaggaggctcagcctcagcagagaattgcttgaacccgggaggcagaggttgtggtgatctgagatggtgccactgcactccagcctgggtgacagagcgagactgtgtctcaaaaacaaacaaaaaagaaacagagaagtatatgcgaaattaaactggcaacatgttaacaattattgatgctgggcgaagatacatgagatgtcatcaaactattttcactttttttttttttttgcaagggagtttcactctttttgcaacccccgcctcccaggttgaagcgattttcctgcctcagcctcccgagtagctggaaacacaggctcgcatcaccacgcccagctaattttgtattttcagtacagacagggttttaccatgttggccaggctggtctcaaactcctgatttcaggtgatccagtggcctcagcttcccaaagtgctgggattacaggcgtgagccaccatgactggctaatttttgtattttaagtagagacagatttcactatgttgaccaggcttgtcttgaactcctgacctcaggtgatccacccgcctcagcctcccaaagtgctgggattacaggcgtgaaccaccgggcacagctaaacttttcataattaaaaaaaaaagaaaaatttggccgggcgcggtggctcatgcctgtaatcccagcactttgggaggctgaggtgggtggatcatgaggtcaggtgttggagaccagcctggccaacatggtgagaccccacctatactaaaaattcaaaaattagccgggcatagtggtgggcacctgtaataacagctactcgggatgctgaggcagaagaatcgctcacaagtgctcaccactgttgcgggaagtcagggacccctaacagacggaccggctggagccacggcagaggaacataaattgtgaagataacatggacatttatcacttcccaaataatactcttataatttcttacgcctgtcttactttcatctcttaatcctgttatcttcataagctgaggatgtacgtcacctcaggaccctgtgataattgtgttaactgtacaaattgattgtaaaatgtgtgtttgaacaatgtgaaatcagcgcacattgaaaaagaacagaatgagagtgattttagggaacaagggaagacaaccctaaggtctgactgcctgcggggctgggcaaaaagagccatatttttcttcttgcagagagcctataagtggacgtgcaagtaggagagatattgctaaattattttcctagcaaggaatattaacattaagaccctgggaaaggaattcattcctggggggaggtctataaatggccgctctgggaatgtctgtcctatgcagttgagataaggactgagatgcaccctggtctcctgcagtaccctcaggcttactagggtggggaaaaaccccgccctggtaaatttgaggtcagaccagttctctgctcttgaaccctgttttctgttgtttaagatgtttatcaagacaatatgtgcaccactgaacatagacccttatcagttctgcttttgccctttgccttgtgatctttgttggaccctgatcagtagttccgttttttgccctttgaagcatgtgatctttgtacctattctcggttcttacacccccttcccttctgaaatccttaataaaacttgctggctttgagctcaggtgggcatcatggtcctaccgatatgtgatgtcacccccggaggcccagctgtcaaattcctctctttgtactctttctctttatttctcagctggccagcacttacggaaaatagaaagaacctacatcgaggccgggcacagtggctcacacctgtaatcccagcactttgggaggccgaggtgggaggatcatgaggtcaggagattgagaccatcctggctaaatgtgaaaccccatctctactaaaaatacaaaaaattagccgggcgcggtggcaggcgcctgtagtcccagctactggggaggctgaggcaggagaatggcatgaacccaggaggcagagcttgcagtgagctgagatcgcaccactgcactccagcctgggcgacagagcgagactccatctcaaaaaaaaaaaaaaaaagaacctacattgaaatattaggggcaggttcccccgataccaccatgcgtggctttttaaaatttttttttaacagatggcctcttactatgttgcccacgctggtgttgaactcctggactcaagtgatcctcctgccttggcacccaaagtgcagggattataggcatgagcaaccacacatggccatgataatagctggaaaacacaaaaaggccgggcgtggtgggtcacacctgtaatcccagcgctttgggaggcaaatgcccgcaaatgtgggcagatcacaaggtcaggagtttgagaccagcctgaccaacatggtgaaacctagtctctagtaaaaatacaaaaattagctgggcgtggtggtgcgtgcctgtaatcccagctactcaggaggctgaggcaggaaaatcgcttgaacctggaaggcggagcttgcagtgagccgagatcatgccaccgcactccagcctgggcgacagagcgagactctgtctcaaaaaaaaaaagagagagagagagaaaatagccaggtgcggtggctcacacctgtaatctcagcactttgggaggccaaggcaggtggatcacgaggtcaggagttcaagaccagcctggccaagatggtgaaatcccgtctctactaaaactacaaaaattagccgggcgtggtggtgggcgcctgtaatcccagttactcaggaggatgaggcaggagaattgcttgaacccaggaggcagaggttgcagtgagccaagatcatgcctctgcactccagcctgggtgacaaagcaagactctgtctcgaaaaaaaataaataaataaaaattaaaataaaaaaaaaagagagaaaacaaaaagaacaagctatggagaggtccccatctagactctgaatcaagagtccagagagacagccctgtggagtgcttgagagcactcctactccagctgcccttggggccatgtcacaaatctgggccagcatccccatcatctcctgagcaccacaccttccttggatgcctgtgaccatcactcgtatcaggtcttgtcacctcctgaccaaagcatggccatcagggactgtgtgggtgtccaagcttctgtccatgcggccctggtagtcattggtgggtgtcccttctcaaaagtgagaacacagggtgctgggtaacctatggtgtctttttgccttgacagccccacgccgacacttactcccgtggtcctgtagactggagggatcctcagaagtgggcttaccgagatctaagcagccgaggatcccaacgacaagtcccatcacgtggtacagaggcaggaccgtgtaaaccacatcatcagctgtggccccagataaggacagcatcttgctcatctgcagtacccgctcatgcgtgaggatggctggcttcgggaggccttgggatgaaggcatggcaagggcagggtggtgacatgacagcacagagaggggcctgaccagagggatagatctccaacagccaggcctacattggggtttgaggctctcagagaacagtcaagtatagggatttgtggttgggttcacaggctgaatttggactgaaagtaatatgtcaagatcaaaggtttcagtggctgtttactggacacaggaagaattctggcattgacctctcaaattacattgggggtcagagttcaggccaaatatcaaaatcaagtctgggagcagtggctcacgcctgtaatcccagcattttgagaggctgagttgggcaggtcccctgaggtcaggggttagagaccagcctggctaacttggggaaaccctgtctctaccaaaaatacaaaaattagctgggcatagtggtgtgtgcctgtaatcccagctactcaggaggctgaggcaagagaattgcttgaacccaggaggtggaggttgcagtgagccgagattgcaccactgcagtccagcctaggcgacagagcgagactctgcctcgaaaaaaaaaacagccaaacaaaaaacaaatgtcaaaatcagagggtaaagtggtttcagaggtcaacactgagtcacaagtcaagtgtggggtcaggtcagcctgagagttcagaggctggtgctagggctaatgggcaccctcaccagtggtccccgaggtatagatgaagagggcagggcttctccatgtgatcccagcacgcaggtcagcaggcactgggtgggagggcgctgcatccagggcagcccccagagcccccacccctggtgtaggggaggtatggctgaggtagaagcagcggatgttctcagcctgcagcttgggaaggatctcctccaggctctcccggaggtctgcagagatgggtcagaggagaaacagaggcaaggctcacctttgaggttgcgaggcgggatctgagacccacagatgcaggcagaggagcagctagtagagaaaagcatccatgttgtttggtaaagaatcccatcattagtatttttggtcaaattgtgggaaaattaaactctgatgacctgagaactactttctgctcataagtcttgattataattgcctgtgaaagtaggcaggtggggaccaagggcctctgccagtcccagcagaacccctgtcctatagtccctgcccttgcccccttccattctccactggctccaaggccctcacctgggtccaccaccagcacccgggccccagagctcagcacagagtgcgccaggggcatcccccggccatgcgggttgatccaggctgttgggcagcccagcttggccagccccagccacatacacagggctggaacggcctgggaagccagcacaaggagggcagtaggctccccggcacacaggctcgcagggtcacccagctcagccttcagggcccatgccgcctggcaggcccgggcatccagctcaccaaaggtgactgagccggccccaggccccgtccacaccaagagtgccctgccaggctgcgctcgtgctcgccgctcgaaggcatctacaaaggtgtcaggcggctgccggctcaagcatcccctgatcttcaggcccaggtggaggatcttggccaagaagatcacatcagccggcagccagcgtagtcctgggggcagccgtgctggcaggagggttagtgccagggccgcagctgccaggctcagcccatggggcacccaggggccgagccagggccgtgctaacatggccagcccaagtagcacgcaacatgtgggatcccccaggagccagcgcagggtcaaggccacagcgactggccacactggctgccccaggccccagagcaggagcagcagcagcagcagcaaggccaactgttgcctgacacccatggtaccagctcctccctaggagcagcagctgtggagtgttcaggctcacctctggcccctcaagagtagcccaatggctcctccccaggggtggtggccctggcactgctgacagtggctggtcctctccccaggactttgcccccagcccttctcctctacgtttgtttgctctgcctggtcttgtgtgtgggtccagcccctctctgcctggcgctaaccctttccatcactggcctctgggttcccaggtctctgccccttgggcaccactagcctccttcctgctgtcctgcttgccccatccaccctccagggctggcatctaactcccttgcctcccctcccatccctgctgggtaccagacactcagagcacagaaatccctgcccttgggaacactccaatcaggccaaacagaaaagcaacaggacagcaaggtggacctcattgggaggtcctcctgtgacacccactgaaaccctgaggagaggggctcagccaggctaagccccttgtcccatgatccgaggaatcgtaccctcctgccaggcatacagcaagtgctcagtaaatacaggaacactggcatcgcctggattcaaacccagctctgccccccacccatgtgcttgctctgactctctgctccacctctggctttgacgacgatggagtcctggggttcaggagactgaagtcagcccatgatgcacacagttggatcatgaaagccctggcctctcaccttgaggaagcagtctcagaaggtgaacccagaggagctgccattggcctaggagcctggcaggtcaggctggggtatggcctggggccataccccactccaccagctccaaatccttatggcagggcacctaggctaggagccactattgtgctgaagaggagaggggcaaagagtggctgctctctccgctggatgcaggggcctgggacactggctggccagtaggggtggtgtccccaaccgcccagcagtcagccccaggatcccacccctcactgtttcctgcccccaacacggccatcggagccctccctgaactttgcccccagcaccaagggcagatatatgggggcttatataccctcagtgcaacctggccccaaagatccccctgggctccccacaagtaaggtgctcagccatgtccatcaaggtcggggaggggaagtcttaagtccaaaagacccttagagcctgactggaagatctatgggaggggccttaaaggtcgtggacagcagcaaccaggagtatgatggggctttcacgtggcctccctctcggagacccacctcagatgtggcctgcctatcctactccccacaggactgagggatccaagagaaccaagtgctggttatatatgcagcccaccttagcccctacagaatagaggtcctagatggcaaagtggaccatcctgttcctgcccaggacagcctgtgggccgcatggatgccacccaagaacagggacgctgaaccctgacactcacatcttgtctatgagggcaaggcacgcactgatccaggtgctcacagcttcgtggtttaggccccatggcctacagtcctttattagagcgagagtcccgaggcccagcccccatatatgatgggtccacttgagtctccttaggcgccccatgagggagtaacagcttgggtagagagctagggaccttgcccagcctgaccctggggcaggcaagcggccccccagcccccaccaccaccccaggagagggcggggtgagaaccggagtcaaatcttgggccgggtccaagcgcctgagcgcccggtttacgcaggaaatagtccagttctcagaagtggtctaaccagccccagccccagcccggcaccacctggagggttcaagtacatggaggagaggagtaaggcggacttaggccctggtatggagaaagggtgaagggagagagaggacctgcgctcaggagggagcgtggtctagtggcgggaaccacgggtcccgcagcgggcgtggccgactgtgcgggaggccccggatccaccgtgggcgaggccaggccccagcgccatcagggcgcagggtgcgccgccaggtggcgctccagcagcgcgcggtgcgagaagaccttgccgcaggcggggcagggcgcgcgctcgggccggtgagtgcgcatgtgcacgttgagcgagctcttctgcgtgaagcgcttggcgcagacggcgcactggaaggcgcgcacgccggtgtgcgtgaccatgtgtttgagcaggtagtcgcgtagagagaaggatcgccagcacacggcgcactggtgcggcttctcccctgcggaagacagggcgggccgcgaacgcaagtcagactctacagctccccgcccccaccccaccccacccccacctgggctcctggacctagcaggggctcccctcccctcccgaaccaccaccccgggatcccttgcctatcagagaaccctcccctcactatgggatcttcctgcccagcagggacaccccctcctctccaggacctcccttcacgttgggactttcctgcccaacagggatcctcatacactgtgaggtacccctctcccatcccttcctggcagggaccccctttctgttatcctgggatatcactgtgacagggcacccctaaatccagcaagcaccctgtctgcaaggaacccagcctgtctggaacatctgttggccatctggactgcccactgggatctccctctaccctcaggtaccctccccctcaacccctacccacccggcacagggagacactgggtcctggcccccctcgcctatgcccatagagtcccctaaactcagtctgacaaggccagtgccctttcataaggagggacctgggcacatctgccaccttcctgcaggaagccccagttgcccagaacccctgcccgctggccactataatgtccttggtgtgatagagagagctcctcattctgggttaggggaggggaggcagtctgagtccacccctagattcatcagatgttaacaaaatgcctgtctcagccaggcgtggtggctcacacctgtaatcccagcactttgggaggccaaggcaggcagatcgcttgaggccaggagttcgagaccaacgtggtgaaaccccatctctactaaaaatacaaaaaatagccgggtgtggtggtgcacgcctgtaatcccagctacttgggagactgaggcacaagaatcacttgaacccaggaggcagaggttgcagtgagccgagatcacaccactgcactccagcctgggcaacagagggagactcggtctcaaaaaaaattaaaaaaaaaaaaaccctatctcagtggcagtggactgaaaggcagtgcctgccagagggtaccccagaataacctggcccaggcacctggctcagatcacacacttcacacagccagcactaccctggggcctctggcagttccctggagactaatcacccaactcccttattcccaggcccctggcttctcccagggcagccagaggtgattttaaactgacatctcagtcactccccagcttagaacaccatggcttccccaccactcacagtcaaatcccaagttccagcccctgcagaaaccccctcactatcactgtggccttccagccaaatttttgctttttctgacaatgctcagcaggcttctgctttccattcctttgtcctccatctcagagcccccagggagcatcctcaccacattccccagtaccaccctcccactctttacctctcctgcagcactgcagagccgcctccctgacacggccaaggtccgagggaacctccccacagcttttcggggtcctctgcagctgtggagtccccacactacctatgttttcctactcatgccccagtctcaggagttcctggggccttcatcccaccacctctgagggctttctacccctgggcctgtaaacccatcctcccttgctgccagcctataacgggacagctggaaaccagagagacacaggaggctccctggagcatagtttcccaacctgccaggacctcctgccaaggctccatacccatcatgtgcatcccaggctgctcaagtttccaccaccacccttccaaaggccaggacaggctcctgcttccctacccagcctcaggatccccctccacagaagccagtgcctgctgctccacagagtggggctttcccctcccccacataccttgcacttgggggaaggctcaatttctaggccccctgctaaccaaaagtaacagaacagtgccagtgccctgtaactagtgctcaattccccctcaggtttaactctccgatgagagattgctccctctcctcccccgccctggctcacccgagtggatgaacatgtgcttggtgtagtttttccgggagctgaacgtcttgcgacagtggctgcactcatacgtaggtggctcagcacctggggtgcgagcaggggtgcctgagggggccgtggtgggagcagcagagggagccgggacctcccccagctgagtactgggggctgcctcgggctggagtgtggggtagaaggcgggtgggggcgcaggggctggccccgatggtgctgaagggggtggtgcgggtggcccaggggcacccaagtgaaaggggaagagtgcaacgggcggccctggggtcttcacaccaggcgggcgggatccagacagtatgcagtcgggctggacaggggtctcagtgggacagccttcggggacagcgccatcctcgtcgtgccaagtggatacatagctgtctggaaatacgtcctcagctgacccagctccccgaagaaaatctctcccggcaccactgtagtcagcgaggccagtgggtgcagggggctcctcgcacgcgctgtcagcagcagcagtgaggaagccagcagcacagtctgggaaggaaggaggtgcctggccctcgcctgggccgccaccttcgccatcctcgccatcggtctcatcgtcactttcctcgtcatcctcgtcacctcggtcatcaggggccgcggacagtgaggggtcagcatcaggcccctcagccttggcaggtgttgggggcgctggcagctgcaaacgcgcgggctggcgctgcttacggctgtgtgcagcaccggggtgccccgggggacgtgcagccagcaggtggcgcaggcggtgacgcagctgcgcaggtgcgagtggcgggggcacaggggtgggcaggggcgtgggcgcagaggtgcccggggctcgagcgcgggcgataatctgcgtgcattcgtcgataactgtctgtatgcgaagcactgacgcggccgtgagcacctgcagggcttcaccctgcgccacaacgagcgaaccgctgtacaggaactctaccagctgtcgcactgtctgcgcgggcaccaccggaggcacacggatctcagagtggccgagcagcagcttgtcttggaagaagggtgagccggccgccagcacgcagcggtgggcacgcagcgaagcttcacgaatgcgcacagtcacgtcacagaagtgtcccccaagcctctgcccattgagggtctcaagcagagagcgtgagaagttctgcaggtgtatgtgatgcacagcctctgcagccgccatctgcacagaacaagaggagggcagggagaggtcaactgaggacccccatctgtcccaacgtccctgtcccctcaccccttgttgcaggacagggctcgagtgcaccacactccaaggcgcgctaacccatccctccccagctgcccttcacagtccccattcccaacacaggacactccagcactccctcctccccctacctcagacctggccaggccgtctacagccccccattaacgctgcaaaccctagcacacccctaggagagggtgttggcctcaatcactgctcccgaaaaggttcaggccttggcctactctatgttgactcacccacccaccccaccccaactccaataaccctaagcctccccatgtgcccctccaagagggcagcccggtgtgtagaagaggccagggacccccatcccaactggctaacctgcctcaccccgagtagaccttgctctctacccagctagcttccactcctcctccacccctgctgacagctccttttggtttcctttagccacatccccccagtatgagaccctgtgcataggcaggattgctgcctcagaaccaggtcaccttaactagtatatacagaggctctcgcaggagtggggtggcatgacctgcttcctgggcagggtggttctgggtgtgcctagtcactaagggctgagggtaaaaggttgggcagtaccttgggagatgccccagggaaaccagtacatgctccctggcagcccctagcatagcgagcagggaggtggctcctgcagccccagcttcttgccatctcgatggggcctgtggggcccagggtgtgggtgtggcacagagaggggaagtgtggattgagcaggggtgtgtgactggatagctgcccatggagtaatcggggacacggcccaacatcaggcaccagaaaggggagggggtagtcctcagaggactctggaatctgaggagttctgctactccatccatcaagcaggtaaaccgtgatccttcggcctgtttccccttctatcaaacaagggatgagatactcggctcatcccgcacccagactgcacacacctccagtctaagggaggagggtaggagctctggactctgacatccgtataggctccaccagcctgtctctcccttggagtcacaaagccccagggtgggctcggcttgatgctgcccctacaccctcgggctctactggggtctcaagattcaacccctccgactccttatgcccaatccgccgtccctttgctcagccagacgcctcccttttttgcatgccccacatttgaccctcagaccacttcgagcacctccactgccccgttcccgctgtcctggacggatgaagaaacctggctggtgtctctgcgcccctcgcctccccttctgttccccacacggcagccagagggagcttttccagactacggatccggatacaccaccccgctccctggccctgttctgagccttctgtgcaatgcctcaaaaaagccaggcctgtgcccgcgcaaaggctaactcagcaagcagcaccgccccatctgtattcacctagcacctgaaaggattctaatctgtccggccgatggggacggaaacttgcgcatcaacccgagagacttgaaccttcctttcccgccccgccccgcgacgggctccattcctcagtcccgacgccgcaaggccggcctggacacttcagaacaaaggcctgcactcgagacccggcgcccaggccagcttcccgggtccggcgccgcacactcccgccacgccttcgccgcgccgtgtgctttactccgagcgcgttctcccatactctgctccattgcccgcgccccaccctacgcccaaagcacccctctgacccgccgctgccaccccgcactctggcccccgccgtaccccggtcctgcagcgccccctcgcgttctcagcgtgcgcttctagcggagcgcaggtgcccctcccctggcacgccccagcctcctcgcccgccctgcggcagggggatgcccattcgaccccacctccgactcctcttcaggcaccaggctctgccgtggccgcttcctcctgaccgactacaaggccgcacttccgggccgttaccccggcggaacggaggcctgcggtcgcggcggcgcaggggaaaccctaggccgaagcacgtttccggtatttttatggcgatcagctcccgccagtctgcactccggctctcctcttagtcggaaccaaagtcgaagaggctagggctgccgcgtcgcgaggaatgtctggaccagagcactcttccggcgtcgcccaggagatcaggggtgtggcgggcctgcgcgatcaatccgcaagctccctgtgatgcagaatgggaaggcagttcccggcccaagtgcccaacgtgttctggccagtttaaaccccactgcgaaccggggaagtggccttattcctgtgacacgggtgagagctgaagtaggtctcggtccctggccgccaggaggtgcaagcaagctaccactactgcagacgctccaggcccgcccgctgtgggtgggactggggaaaggaccccatctcggccttggcaccttctactacaacgcagacaggaatagacaactgcctcaccctgctctgggcctcccctgagctagaccctgtgagattctgggacattgcaagtcaatctggtatgggggacagaattccgaaaatggccccctccgagatttccgtgcccaaatccccagaacctgtaaatatgattatctcacctatgaatagttacactacatggtgaaagggtttttgcggaaataattaaggttactcattagctgatcttaaaataggatatgattctggattattttggtaggtccaaggtatcataagggtccttaaaggcagaagaggaaggtggagaaacttgaagtaggagaagggttccagaggctttgaaggtagagaggtccatgagaggaaatgcaacaggacaggtgtcatgctgagaatctgagaagagctgcaacaacagccagcaagaaaacagacctcatggcccggcgcagtggctcatgcctgtaatcccagcactttgggaggccaaggcgggtggatcacgtcaggagatcgagaccatcctgactaacacagtgaaaccccatctctactaaaaatacagaaaattagctgggcgtggtggcaggcgcctgtagtcccagctactcgggagactgaggcaggagactggcatgaacccgggaggcggagcttgaagtgagctgagatcgcgccactgcactccagcctgggcgacagaacgagactccgtctcaaaaaaaaaaaaaaaaaaaaaaaaaaaaaaaggccgggcgcggtggctcacgcctgtaatcccagcactgtgggaggccgaggcgggcggatcatgaggtcaggagatcgagaccatcctggctaacacggtgaaaccccgtctctactaaaaatacaaaaaaaaattagccgagcgcggtggcaggcgcctgtagtcccagctactcaggaggctgaggcaggagaatggcgtgaacccgggaggcggagcttgcagtgagccaagatagcgccactgcagtcgggcctgggcgaaagagcgacactcagtctcaaaaaaaaaaaaaaaaaagaaagaaagaaaagaaaacagaccttagccctagaagtgcgtggagctagattccgcccacaacctgaatgagcttggaagcaaattcttccccagagcctccagatagcagcttagtccataccacaccttgattttagcctttatgagacccacagaagacctacttgggcttctgacctatggaatggtgagctaataaatggatattgttttaacctatggagttttggtaatttgttatagtaacgatagaaaacaaatacatctggtgagatccagggcctccacacagtgagagtccaataaatgccactatttgtttcccatctgatgaacgcattcctcacatttccctcactgaaagctttatttctgtgccttcccagcttttaccaggccccttcgtgatctcattcctcagggagcagttctcacttcccctatcccagaggacagagggactcggcagtgaaagagggaaccaactgtccaaacgcatgactagaacaaagcctccagaagacagacagggtcaggatgcctgtccttcacccaggacagctactgggtgattgtgttgtagatgtggtatttggaggtcagggggaggaaaatatgtaccaggtgggaaacctcattaaaacacaagtctaggctgggcacagtggctcacacctgtaatcccagcactttgggaggccgaggcgggtggatcacctgatgtcaggagtttgagaccagcctggacaacatggtgaaaccccgtctctactttttttttttttttttctgagacaaagtctcgctcttgtcccccaggctggagcgcaatggcgcgatcttggctcactgcaacctccgcctcacaggttcaagcgattctcctgcctcagcctcctgagtagctgagattacaggcacctaccaccatgccccactaatttttgtatttttagtagagacggtgtttcaccatgttcaccaggctggtctcaaactcctgacctcaggtgatctgcctgcctcggcctcctaaagtgctgggattacaggcatgagccactgtgcccggcctgtccctactaaaaatacaaaacattagctgggcgtggtggcgggtgcccataatcccagctacttgggaggcggaggcaggagaatcgcttgaacccgggaggcagaggttatagtgagctgagatcgtaccattgcactccagcctgggcaacaagagtgaaaatccgtctcagaacaaaaaaacaacaaaaaacacacaagtctaataacctgccatcatcgtctttgttcagactcaaaccatggcctgctggacccactgggtctgctttcactgggctgagttttgggaagagcataagggtaggtgggaaaggcatgcatgaggcctctgaggagggaggacggccctcccttgggcaagacaaatgagtgaaccttgggctgagtggcaggattgcagtgtgttgagggggggaagccatgtcccattagccccattagcatgtttaaggggctgtagggaagacagtgcacctagtggggtggcaaacgcaggagtcctagcaggaaacaatagctgccctgacagcagtgaagggtagaaagggacagattcagggtaggaaggagaggacacgggtggctttagagaaagtctcagctccaagggatggggcctggaggattagggcaagataggggtggaagaccctgcccaagggctaggatgaacacaggaaggagaaaaaccaaaccctgacctctctcaagcagccaagggaggtgagagctgcagcctcaagggttattttccttttctctctaaagatcttttcacaaggctgggcgtggtggcgtctgtggtggcgtctgtaatctcataatttcagcaccttgggaggcttaggcaggtggatcacctgaggtcaggagttcgagaccaccctggccaacatggtgaaacccggtctctactaaaaatacaaaaattggccgagcacggtggctcatgcctgtaatcccagcactttgagaggctgagacaggtggatcacctgaggtcaggagttcgagaccagcctggccaatatggtgaaaaccccatctctagctgggcatggtggcgggcacctgtaatcccaacttctctggaggctgaggcaggagaatagcttgaacctgggaggcagaggttgcagtgagccagagatcagctgtcattgcactccagcctgggagacaagagcaagactccatcttttttgtttgtttgtttgttttgagatggagtctcactctgtcgcccaggctggagtgcagtggcgcaatcctggctcactgcaagctccgcctcctgggttcacgtcattctcctgcctcagcctcccgagtagctgggactacaggcgcccgccaccaggccccgctaatttttttgtattttcagtagagacggggtttcaccgtgttagccaggatatggactccatctttaaaaatatatatatatagaaaaattagctgggcgtggtagcaggggcctgtagtcccagctacttgggaggctgaagcagaagaatcccttgaacccaggaggtggaggttgcagtgagccaagatcacgccactgcactccagcctgggagactctgtctcaaaaaaaaaaaaaaaaaaaagggcttgggacggtggcttatgcctgtcatctcaggactttgggaggctgaggtgggcagatcacctgagatcaggagttccagcctagccaacatggcaaaaccccgtctccactaaaagtacaaaaattagccaggcgtggtggtggtgggcccctataatcccagctactcgggaggctgaggcaggagaataccttgaacccgggaggcggttgttgcagtgagccgagatcgcgccactgcacttcagcctgggcgacaagagcaagactccgtctcaaaataataataataataataaaaagaatgtgtatatatatgtgtgtgtgtgtgtgtgtgtgttcatatatgtgtgtgtgtgtgtgtgtgtgtgtgtgtgtgtgtgtgtatgaacccaaagaccttaaccctggttgtgggggcatttcaaggaataaatgtgtacctgagaacacaggtttgacaagctagggaggagggcgatgtggcctgcaaatattaaaaactccaggctaggccgggtgcagtggctcacacctgtaatcccagcactttgggaggccgaggcgggcggatcacgaggtcaggagatcgagaccatcctggctaacacggtgaaaccccatctctactaaaaatacaaaaaattagctgggcgtggtggcaggcgcctgtagtcccagctactcaggaggctgaggcaggagaatggcgtgaacctgggaggtggagcttgcagtgagccgagattgcgccactgcactccagcctgggcgacagagtgagactccgtctcaaaaaaaaaaaacaaaaaaacaattccaggctaagcccaaggcctgagatgggaaatggtggccattgagggaagagtctgtgagagcacagtgaccacagatgtgaaaggagcagaagaaattgagctccagggtgactgggcctcctcagctggctaaggcagggcccctctgacagcatgggtcagagaacagacagctcccaccaaggagtcttccagaacctctcggctgtgcctgattccatctcagtcaggatcccaacctccctccaccctccatcacttcccggccagcctttcatccaggctccccctctttggcagtcatactcaagtccttgtgtccacaaacccggccccatcctagtgggtttgggttgtgccaggtgtggaatacaggtcccatgatccatgcacaatggttgtgggggcatttcaagtactaaatgagtacacacaggagcaggcactaagcatatacctgcagaaatgcttcctggtttaaggcagatagcagcggaggctgaggggtggtccctggcaaggcaaatagcagcagtgaagacttgagcccttctgatgggacagagaagacatgggagccgtgtgaggtgtgaaggggcaatggcaggatcccctgtatactccagaaagtcctctgaggctgcagcttagagagaggctggagggaggcccagccccaggccctggtggagccagggaggtggtagaagcaatggctgggaccaggcaagttgccgttgggatttaccagaaaagtaacagcatccatacaggtattgagggctgttaacaaaggcaggtgggggcaaggaaaatttacaaccgagaaaagatttaatgtgctttcatatgtaaaatacaaagaagaaggtactaccagccctgtggacagaggcctgagaactccggaagaaggagacctaaattgagacaatactgaaaacaacacaactgccacaggcgctttgccagagtcccagcaccttgacctgtactgtgcccttggattaattctgaagagtttaaaaaacccaaaggctgggcgcggtggctcacgcctgtaatcccagcactttgggaggccgaggcaggcagatcacctgaggtcaagagttccagaccagcctgaccaacttaatgaaaccccctctctactaaaaatacagaaattagctgggcatggtggcacatgcctataatcccagctatttggcagatcacctgaggtcaagagttccagaccagcctgacctcccaaagtgctggggttataagcatgagccatggtgcctggactttattattattattattattgagatgcagtttggctcttgttgtccaggctggagtgcaatggcacaatcacagctcactgcaacctccacctcccgggttcaagtgattctcctgcttcagcctcctgagtagctgggattacaggcgcctgccaccatgtccagttaatttttgtatttttagtggagacggggtttcaccatgttggccaggctaatcccaaactcctgacctcaggtgatccacctgcctcagcctcccaaaatgctgggattacaggcgtgagccaccacgcctggctgttattattattattattttttttttttttttttttttttgagatggagtctcgctctgtcgcccaggctggagtgcagtggcgggatctcggctcactgcaagctccgcctcccgggttcacgccattctcctgcctcagcctcccaagtagctgggactacaggcgcccgccactacgcccggctaattttttgtatttttagtagagacggggtttcaccgttttagccgggatggtctcgatctcctgacctcgtgatccgcccgcctcggcctcccaaagtgctgggattacaggcgtgagccaccgcgcccggcctattattatttttttgagacagggtttcactctgtcgcccagcctggagtgcagcagcatgatcacggctcactgcagcctcatcctcccaggctcaagggatccttccacctcagtctcccgagaagctgggactacagttgtggcccaccacacctggccacaaaatgtgttttgagtaaagctctaaggtgaaggggaaagccccaaccccctattgtgggacacctggctggttccatcccgaaaagacacagtgaagctctagctgcatcccagaagataatacatccactgaagccaggttaaaatcattctccctttaatcaattttcctctattgcacccactgctcctcgatgccctggagcgaggaattccaccacccacagtaggtgtaagcttggcagctccagttttatggccccaggggacagtctttcacacctccagacacgaactctgccatataatttcccatgtgcacaattcagtgatttttagtcagtttattgtgttgtgtaaccttcaccactgtcctgttttagaacatctccatcacctccatgagattgctcagcccatttcctgagcgtccccacccctgtccccatgaatctgtccatggatgtgtctgcttgacatttcctatcagtggaatcacacaacatgaagtcttggtccctgccctctccagtcctgtcactttgtctcaggctcctgtgccacccgggtgttgtgaattgtctctggtcagatggttcagtgttttccactcaggagtggctagtctgagaagtgcttccctactaaggtgggcaactgaggcagaacagccacccagccttgttctcccagccgtcttcctgctggacccatggtggccaaggcctcagtccaggaggaatcaacctagacttgccacaccctgactttgtcccctccctctttacaagggctgctctccaccctgcctgctttgtgtttaagatattgggccatggctcacccctgtaatcccagcattttgggaggccgaggtaggtggatcacctgaggtcaggagtttgagaccaggctggccaacattggcaaaaccctgtctctactaaaatacaaaaattatctgggcgtggcagtacgtgcctgtaatctcagctactcggaggctgagacaggagaatcccttgtgaaagattctccctggggcctgaaagcttcgggggataaataactcctcccttctcaggcccagtcccaagatgcaaggccatttgtgccagcaacgtgcatcagcaagatagcagaagcaggaagagagctggccggaagacacatacccctgaagatggagggagagaggccctgggtaccacatagcagtaacatcagactaggacacttcctgtttacaggagactataaaactcctgccctgtccttacttgggacacccaggcgctcattaaaatagcatgttgctccacaccgcctcgtgttgtttgttggtgcgctctcggggttcaaaccgatactagagccttgcagcttgaacccaggaggcagaggttgcagtgagctgagatcgcgccactgcactccagcctggacgacagagcaagactagttctcaaaaaaaaaaaaaaagtccaggtgcggtggctcacgcctataatcccagcactttgggaggctgaggtgggcggatcacctgagatcaggagttcaagaccagcctgaccaacagggagaaaccccatctctactaaaaatacaaaattaggctgggcgcagtggctcacgcctgtaatcccagcactttgggaggccgaggtgggcggatcacgaggtcaggagatcgagaccatcctggctaatatggtgaaacactgtctctactaaaattacaaaaaattagccaggtgtggtggcatgcgcctgtagtgccagctactcaggaggctgaggcaggagaatcacctgaactcgagaggcggaggttgcagtgagctgagatcgcgccactgcactccagcctggatgacagagcgagactctgtctcaaaaaataataataataattaaaacattttaaaaagaaaaattagccaggtgtggtggcgcatgcctgtaatgccagctacttgggaggctgaggcaggagaattgcttgaacccgggaggcagaggttgcagtgagctgagatcacgccattgcactccagcctgggcaatgagagcaaaactccatctcaaaaaaaaaaaaaaaaagacattgatgagctcatcttttaacctcataaagcatcttttgaaaacaaggatggggtcggatgtggtggctcacatctgtaagcccagcactttgggaggccaaggcagggggatcgcttgatcccaggaatatgagagcagcctgagcaacatggcaaaccctgtatcaaaaaaatacaaaaaaagtttagccaggcatgatggcgtgtacccgtagtcccagctatgctggaggctgagatggcagcccgaggaggttgaggctgcagtgaagcaggatcgtaccaccgcactcagagcaagaccctatctcaataaatacacagataaccgttttaaagtgaacaacacagtgccttctagtatagtcacaatggtgtacaaccacctcctccatctaggtctaaaacaatttcctcactacaaaataaaaacttttctcccctctcctcagtccctggaaaccattaacctaaccttctgtctaaacaaatgtgctgattctggatttttttaaattatactttaagttctgtgatacatgtgcagaacgtgcagttttgtcacataggtatacacatgccatggtggtttgctgcacccatcaacccgtcatctacattaggtatttgtcctaatgctatccctcccctagacccccaccccagattctgcatattttacataaatggaaccatacaatatgtgagttttgtatctgacttctttcacttagcataaggttttcaaggttcaaccgtgttgtagcacatattagtacttcctttttatggctgaatgagaccccattatggctgggtgtggtggctcatgatgcctgtaagaccagcactttgggaagccaaggcaggtggatcacttgagcacaggagtttgagaccagcctgggcaacgttacaaaaccctgtctctacaaaaaatacaaaaattagccaagcatgatggtgcatgcctgcagtcccagctacttgggtaggctgaggcaggaggatcacttgagcctgggaggtcgaggctgcagtgagccatgatggcaccactacactccagtctgatgacagagaccttgccatgagagcgcatgcacacacacacacacacacacacacacctcagttgtatggatacaccacatttatttatccattaattaattacctaatggacatttgggttgtttctacttttagtgtttttttttgagacggaattttgctcgttgctcaggctggagtgcaatggcatgatctcggctcaccacaacctccgcctccagagttcaagcgattctcctgcctcgcctcccaagtagctgggattacaggcacgtgccaacacgcctggctaactttgtatttttagtagagatggggtttctccatgttggccaggctggtctcaaactcccgacctcaggtgatctgcccgcctcggcctcccaaagtgtggggactacaggcgtgagccaccgtgcctggccctacttttagttattatgaatagtgctgctgtgaacgttcttgcacaaggatttgtttgaacatctgttttctttcttttttttttttctttttttgagacagagtctcgctctgtcgcgcaggctggagtgcagtggcgcgatcttggatcactgcaagctccgcctcccgggttcacgccattctcctgcctcagcctcccaagtagctgggactacaggcgcccgccaccacgcctggctaattttttgtatttttagtagagatgggatttcactgtgttagccaggatggtctcgatctcccgacctcatgatccacctgccttggcttcccaaaatgctaggattacaggagtgagccaccgctcctggcctgaacacctgttttcaattcatgtgggtatataccttggaggtgaattgctggatcgtgtttaactgtttgaggaactgccaggctgtttcccatggtggctacaccattttgcattcccacagcaaagtatgaaggttctaatttctccacatcctcactctcacttgtcattttcagttatttttatagccatcctagtgggcgtgaagcagtatttcattgcggtttgatttgcatttccctgatgaacactgatgtggagcatttattggccatttgtatatgttctttgaacctcgtctccttctcctttttaaatagttgtattgatgtctaatctataagccataaaatacatacagcatttatagggtgggatcgtgtcatcaaccctaacgtggggcactgacagcctgactgtcccctgtacacttacgggttccccctacacagccatgttgacaccacaccctccatgtacctcataacataagcagataatcctgggcagtgcagggatttcattatgggttggcaaattaggctttttcaaattctagcatctaattatcagtgggcattctttggtaagcaagcaagaactggggccatgtgttcccctgaaatacggttccccttgggaaggcaggattgatgccaagttctcagagtgaggggctggcttaaaatcagcatcatatggtgacagatgggtttatttttctggatctctttttttgagaacacttaaggactcatgggtagtgtggatttattgtgcatcagccgatgacggtcactgttctttctgatgctccagctgtttgatcaggtttggcatctatgtccttttaacatatttccaccattctttgggcacctcttactttgtaatacaacaaggtgtttcaggctcagctaggactttccctgtatagtctgtccctgtacagtccttgaatcagccattttccccaggagccctggttcctattagcagggaaagggatgagactctgggctctgagtgtctcctgtcctcccccctccttcctttccctggaagctacaggatgctttgggaaggcagcaaacagaaggggcgagggcacccaccaagtccaggagtgggttgaatttgtacaggtcacaatgtggagctctgaacagtcccttctactctctgggaatgttttcccatctgtgaaattgggactgaagtaactgaaaatggcccccaatgatatatacatcctaactctgaaacctggaagtgttaccttattaggaaaaggggtatttgtaattgtgatttaggttcttgaaatggggagattacctggaattatttggtgcgccctacatgcaaattaacatgaatcgtaagagagaggcagaggagaaaataacgtaaggctacatggcacaaacaacagaagattttttctcacagttttggaagggaaagtttaaaatcaaggtgcaggcaaagtaggtttcattctgaggactctcctcttgctgtgttgggggaagctggggtggagctcttccacatatttgtcttttctttttttttgagatggagtttcgcgcttatcgccaaggctggagtgcagtgtcacaatctcagctcactgcaacctctgcctgccgggttcaagcaattctcctgcctcagcctcccgagtagttgggattacaggtgtgtgccaccatgcccagctcattgtttgtgtttttactagagacaaggtttcactatgttgggcagtctggtctcagactcctgactcaggtgatccgcccacctcggcctcccaaagtgttgggattacaggcgtgagccaccaccccggccatgtttttgagaaaaagtctcgctctgtcacccaggctggagtgcagtggcgtgaactggactcattgcaacctctgcctcccgggttcaagtgattctcctgccccagcctcccggtagctgggattacaggcatgtgccaccatgcctggctaattttgtatttttttagtagagatggggtttctccatgttgattaggctggtctcaaactcccgacctcaggtgatccacccgccttggcctcccaaagtgctgggattacaggcgtgagccaccacgtccggcctaatttttatatttttagtagagacagggtttcaccatgttggccaggctggtcttgaactcctgatctcaggcaagcctcccgccttagcctcccaaaggcattttttcttatggggcattagtcccattatggggccccactatcaggacatcatctaaccctaattatttcccataggccccatttccaaatatcatcacaatgaagattagggcttcaacatacgaattttagaggacacaattcagtccacagcaacgatgcatagaagacaaggcaatatgaagtgagaacagaggtatttgaagctgtcagccttcaagactggagtgatgcagtgacaagccgaggccaccagaaactggaagaagcaaggaaggatcctctcctggccttcagaactttgacagaataaagttttttttttttaagctgccatgtttgtggtaatatgctacaaaatccacaggaaactaacaggaatcatagtgattccaaagagcagttgagaagatctagttgaacactcatcttttgttctccattctgctcccacccattccccaactggaacctttgaaatgggaatcagatcatgccaccttctgctaaaatcttctgttagctcctcattacagttaaagaaacacccagccaaaagccacatacggtattgcccactgtagcagctgtgttaataacagcctgagcaggagggagaatgcagtcaagagaacatgtaagcaaactgaaggacattcatacaattgaccctacacaacaagggccggggaggaactaaggtcatatatggccatacaaatgtgcactgagaagccagacagagaagtaaagccccatgtgttttatgggtaggcaaagcttgtctgtgaagttagggcgtcagctacaagggacatgggcttctgagagccagagatgttctgttctttgctatcacagctggttagctgaggtgctccctgcttgcatctctacatatcataagcctccaccaaaaagttaaaaagtccatagagacagaaagtagattagtgattgtcaggggctggttggagggggactgtggagtgagtgttaatggttacagggattccttttggagtaatgaaaatgacttggaaatagatagaggtggtggctgcacaacattgtgaatgcatgaaatgccactgaatgtacacttttaaactggctaaaatgataaatttgatattatgtgaatattattattattattattattattttttgagacagaatctctatctccaggctggagtgcagtggcatgatctcagctcactgcaacctctgattccttggttcaagcaattctcctgcctcagcctcccaagtagctgggaatataggcacgtgccaccacgcccagctaattttttttttttttttttgaggcggagtctcactctgttgctcaggctggagtgcagtggcgcaatctcggctcactgcaagctccacctcccaggttcacgccattctcctgcctcagcctcccgagtacctgggactacaggtgcccgccaccacgcctggctaattttttgtatttttagtagagacagggtttcaccatgttagccaggatggtctcaatctcctgaccttgtgatccgcccacctcggcctgccaaagtgttgggattacaggcgtgagccaccgtgcccgacctaattcttttttttttcaagttggagtctcgctctgtcgcccaggctggagtgcaatggcatgatttttggctcactacaacctccgcctcctgggttcaagcaattctcatgcctcagcctcccaagaagctggaattacaggcacccgctaccacacccagctaatttttgtatttttagtagagaaggggtttcatcatattggtcaggctggtctcttggccaggctggtctcgaactcctgacctcatgatccgcccgccttggcctcccaaagtgttgggattacaggtgtgagccaccgtgcccagccttaatttttgtatttttagtacagacagggtttcaccatgttggccaggatggtcttgatgtcctgatcccgtgatccgcctgcttcagcctcccaaagtgctgtgattacaggcatgagccactgcacccggcctgtttgatttttttgaattaaaaaatgtactttaataatagacacggggccaggcacagtggctcacactggtaatcccagcactttgggaggctgaggcaggtggatcacctgagatcaggagtttgagaccagcctggccaacatggtgaaacctcgtctctactaaaaatacaaaaattatctgggcatggtggttagtgcctgtaatcccagctactcaggaggatcaggcaggagaatcactttaacctaggaggcagaggttgcagtgagcagagatcgcacctgggctcaagctatcctcctgccttggcctctcaaagtgctaggattataggcaagagccaccaggcctggccatacattgtaactcaattaccaaaaacaaacaaacaaaatttttaaagtaatagataccaaatctcatgttatggtctacaaaactggctcaagatggtcatcatcttcatccatttgcttgtcctttcacatatttgctgatgactgatccaccaagaagtgggctctgggctaagcacagtggatgcagtagtgagtacaatttggagctcatgtccttgtgattttctctagctgaaatggggaagaagagagccaagaagagagcccagagaataacattctgagtagaggcaatagcaagtacaaaggccctgagttgaggacaacaggtctcctatgtggctggaagagtgataaggtcagaagtcagaggtcagcagggccataccctagagttgtcaccagaattggatttttttttttgagatggagttttgcttttgttgcccaggctggagtgcagtgcctggccaacatggtaaaaccccctctctactaagaatacaaaaattggctgggtatgacggtgcacgcctgtaatcccagcactttgggaggccgagatgggtggatcatgaggtcaggagattgagaccatcctggctaacacggtgaaaccccgtctccactaaaaatacaaaaaaattagccgggcatggtggtgggcacctgtagtcctagctactcaggaggctgaggcaggagaatggcgtgaacccgggaggcggagtttgcagtgagccaagatcgcgccactgcactccagcctgggcgacagagggagacgccgtctcaaaaaaaaaaaaaaaaagaatacaaaaattatccgggcgtggtagtgggcacctgtaattccagctactcaggaggctaaggcaggagaatcgcttgaactcaggaggcagaggttgtagtgagccaagattgcgccactgcactccagcctgggtgacagaacgagactccatctcaaaaaaaagaaaaaagaagaaaaaagaaatttgagtgatgtagccacaatgcctcctcagaaagtggctttgggggtgacacctgagggtgggaaggagagcatgcacacgtgtggggtttggggaagagagggtgaggatggctatcttcaggtaggcgcacaaccaggcagtaggcagtcctcaggtggcctgggtgcagtctgagtgaccactgcatattgctacacctgtcttatgccctgtctgcaaagccaaaatattgacagttcacagtggtccaggactgggaagggagagacgtggtaaagtgttggcaaggagcatggaggacagaagtataagggatactgactgctctgccgggccacctggggagcggagccaaccaaggtgcactagcgtcctgccatatacttatggacctctgagtgaggtccctagtcttactctcctatatacccaccctggcttggccaatcctaggaagccccactctgctgtccctgagtcagcttgagcctgttttctagttaatctcccttccccgactggtgtcctggcacttgctgaagcctcaggttctccatgtggacaatggggccccacagtggtgtggaacctggtggggaggtgatgctccaaggtctgctgctggcattgggtaacacctgctgcttgtgtggctgcctcatactggggatgaaggtcttgggcccaggagaaggaaaaggggtgctcttacaatacctctctattgtgcagagagaagagcatggaccttgatgggccactgaaaccccaaggtgtgttgccagggcctggggagggcctgttatgaggggcagccgatgatagggtggcaggggatctaacataccccagaccctgctagctgtagagtaacctctctgagcacctcccaccactcctcactattgcctccctattgcctcagggaccttggacttgtttctgctcaactgccttcctgcaagtgtttggggcagcccctaggagagccatttccacactttgtaccatagtattaatattttgaccttctggccctggtacccttgtctaccctagaggccagaggcaggtgtgggtcctgtgtgacccacacgtccccctctcccgtgattttggggaccagtgcaggatagggctgtggaaagtgctcatcaaatattccttttttttttttttgagacagagtttcactcttgttgcccaggctggagtgcaatggccggatctcagctcactgcaacttctgcctcccaggttcaagcgattctcctgtcccagcctccggagtagctgggattacaggcccgtgccaccacgcccggctaatttttgtatttttagccgagacggggtttcatcatattggtcaggctggtggcgaactcccgacctcaggtgatccgcccacctcggcctcccaaagtgctgggattacagacgtgagccaccgttcctggccacagcaaatattcctaaaggacgcccacacctcgccctgtgcactgccagcaccaactttttttttttcttttcttttcttttcttttttttttaaagacagggcctcgctctgcagtcccaggtaggagagcaggggagcgatcatagctcactgcagccaactcctgggctcaagcgatctcaacgcgtcagcctctggcattaactttccctattatcagaggaaggaagccaggggccagggcgtcttcagggtggtgggctggagggggcgggccggctagcgaggcgtggccctatgaaggggcaggctgggcgtggaggcggtgactatgccgcggatggggtgggcccagatctggggggccgcgcgcccgggctggaacaaaggcagaggcggggacaaagccccgcggcccccagtccccatcaggaacaaaggccacacccggcccagcggtcgacgcgcccgtgctgcagccacgtgcggacacctgggagcggggcccggggaggcagtgccccgttaccctcacgccccgcccggctagccacctttacctgtgcgcgccttgggagtggcgaatgggtttcatggttgttcgcgccagtcctcgcggcctccaaacatcctccggaagctgccacctaccccgcccccagccgttgtcacctggaccggagacctcacgaccccaggggcaccgcacagggggctgaggcccacccccccggggccagcctcaatgcacccacccaccacgttttcaacgcgctgatagtccctaggcgggttcgcctctacctacagaccctgcttctccccttagacatgattcctctcccccagatcctgcgtccctcagacagagttcttctctcacacaccctgcttccctcctcagacgggattctccccccacacaccctgcttccctcctcagacaggattctccccacacacaccctgcttccctcctcagacaggattcttctcacacacaccctgcttccctcctcagacaggattctccccacacacaccctgcttccctcctcagacaggattctccccacacagaacctgcttccctcctcagacaggattctccccacacacaccctgcttccctcctcagacaggattctccccacacagaacctgcttccctcctcagacaggattctccccacacacaccctgcttccctcctcagacatgattcttctcacacacaccctgcttccctcagacaggattctccccacacacactctgcttccctcctcagacaggattctccccacacagaacctgcttccctcctcagacaggattctccccacaaacaccctgcttccctcctcagacaggattctccccacagagaccctgcttccctcctcagacaggatgctccccacacacaccctgcttccctcctcagacaggattcttctcacacacaccctgcttccctcctcagacaggattctccccacacacaccctgcttccctcctcagacaggattctccccacacacaccccacttccctcagacaggattctccccacacagaccctgcttccctcctcagacaggattttccccacacagaccctgcttccctcctcagacaggattctccccacacagaccctgcttccctcctcagacagggctcccctccccacacaccctgcttccctcctcagacagagttcccctccccacacagaccctctttccctcagacaggattttccccacacaaaccctactttcctcctcagacaggattctccccacacagactctgcttccctgagacaggattctccccacacacaccctgcttccctcctcagacaggattctccccacacacaccctgcttccctcctcagacaggattctcaccccacacaccctgcttccctcctcagacaggattctccccacacacaccctgcttccttcctcagacaggattctccccccacacaccctgcttccctcctcagacaggattctccccccacacaccctgcttccctcctcagacaggattcttctcacacacaccctgcttccctcctcatacaggattctccccacacacaccctgcttccctcctcagacaggattctccccacacagaccctgcttccctcctcagacaggattctccccccacaccctgcttccctcctcagacaggattctccccccacacaccctgcttccctcctcagacaggattctccccacacacaccctgcttccctcctcagacagggctccccccacacaccctgcttccctcctcagacaggattctccccacacagaccctacttccctcctcagacaggatgctccccccacacaccctgcttccctcctcagacaggattctccccccacacaccctgcttcccacctcagacaggattctccccccacacaccctgcttccctcctcatacaggattctccccacacacaccctgcttccctcctcagacaggattctccccccacacatcctgcttccctcctcagacaggattttccccacacaaaccctactttcctcctcagacaggattctctccacacagaccctgcttccctcagacaggattctccccacacagaccctgcttccctcctcaggcaggattctccccacacagaccctgcttccctcctcagacaggattctccccacacagaccctgcttccctcctcagacaggattctccccacacagaccctgcttccctcctcagacaggattctcaccccacacaccctgcttccctcctcagacaggattctccccacacacaccctgcttccctcctcagacaggattctccccccacacaccctgcttccctcctcagacaggatgctccccacacacaccctgcttccttcctcagacaggattctccccccacacaccctgcttccctcctcagacaggattctccccccacacaccctgcttccctcctcagacaggaagctccccccacacaccctgcttccctcctcatacaggattctccccacacacaccctgcttccctcctcagacaggattctccccacacagaccctgcttccctcctcagacaggattctccccccacaccctgcttccctcctcagacaggattctccccccacacaccctgcttccctcctcagacaggattctccccacacacaccctgcttccctcctcagacagggctccccccacacaccctgcttccctcctcagacaggattctccccccacacaccctgcttccctcctcagacaggattctctccacacacaccctgcttccctcctcagacaggattctccccacacacaccctgcttccctcctcagacaggattctccccacagagaccctgcttccctcctcagacaggattctcctcacacacaccctgcttccctcctcagacaggattctccccacacacaccctgcttccctcctcagacaggattctccccacacacaccctgcttccctcctcagacaggattctccccacacacaccccgcttccctcagacaggattctccccacacagaccctgcttccctcctcagacaggattttccccacacacaccctgcttccctcctcagacaggattctccccacacagaccctgcttccctcctcagacagggctcccctccccacacagaccctctttccctcagacaggattttccccacacaaaccctactttcctcctcagacaggattctccccacacagaccctgcttccctcagacaggattctccccacacagaccctgcttccctcctcaggcaggattctccccacacagaccctgcttccctcctcagacaggattctccccacacagaccctgcttccctcctcagacaggattctccccacacagaccctgcttccctcctcagacaggattctcaccccacacaccctgcttccctcctcagacaggattctccccacacacaccctgcttccctcctcagacaggattctccccacacagaccctgcttccctcctcagacagggattcccctccccacacagaccctctttccctcagacaggattttccccccacacaccctgcttccctcctcagacaggattctccccacatacaccctgcttccctcctcagacaggattctccccacacacaccctgcttccctcctcagacaggattctccccacacagaccctgcttccctcctcagacagggctcccctccccacacagaccctctttccctcagacaggattttccccacacacaccctactttcctcctcagacaggattctccccacacagaccctgcttccctcagacaggattctccccactcagaccctgcttccctcctcaggcaggattctccccacacagaacctgcttccctcctcagacaggattctccccacacacaccctgcttccctcctcagacaggattctccccacacacaccctgcttccctcctcagacaggattctccccacacagacgctgcttccctcctcagacaggattctccccacacagaccctgcttccctcctcagacagggttcccctccgcacacacaccctctttccctcagacaggattttccccacacaaaccctactttccacctcagacaggattctccccacatggacctgcttccttccctccttgggattccccactgttgaggttcagtttccccatctggaaaagcatcaaagtcagggtagctgctgacgaaaacatggggaggggatgccttggggggctgggtgggatttcacagactcattgctctttagcctcttgtgatttatatatatgtgtatatatatatatatattttttttcttgatggggggttggggggcccggcgtggtggctcacacctgtaattccagcactttgggaggccaaagtgggtctatcatctgacgtcgggagttcgagaccagcctggccaacgtggtgaaaccccgtctctattaaaaatacaaaaattagccaggcgtgatggcaggcccctgtaatcccagctactcgggaggctgaggcagaagaatcgcttgaacccgggaggcggaggttgcagcgagccgagatcgtgccactgcactccagcctgggcaacagagcaaaactccgtctcaaaacaaacacaaaaacctttctctcctcttttgagatggagtttcactcttttctcccaggctgtagtgcaatggcacgatctcggctcactgcaacctccgcctcccgggttcaagcgattctcctgcctcagcctcccgagtagctgggattacaggcgcctgccaccacgcccggctactttttgtacttttagtagagacggggtttcaccacgttggccaggctgctctcgaactcctgacttaagatccaaccgcctcgacctcccaaagtgctggaattacaggcgtgagccgccgcgcccggccacatttttctccatctgtggtctaggctggcgtgcagtggcacaatcccgcctcactgctgcctcggcctcctgggctaaacggagcttcccgactcgcctaagaaagtggtgggattacaggtatgagccacggcgcccggctgtgatctacatttgattcagtcaagtttctgtgtttctcaagtttaactatagcgtggttaaaatccaaaagtcagcacccgagctcacacaggagcttcctccctcttgggatggagactctcctcccctctccctggacacagcccttcactcggtcttggccccgcctacttctccatcggccctgccccctatcccgaactcttagtgacgcagaggctggagacgactctacggcggcgaagagacgcgggttgaggaagagggacggattgcccatgcgcttgggcgcacagcggcccgcttctgtgtggtctggaggtggagctgagaggggaatcacactctataaaggttcgcataccccactggcggattcaattgcggcagtgacgtcacagaggccccgccccgcccccacaagagccccaccgacgtggggttggcggtggtggaaggactaggagttggcgcgtgcgtactggcggcctctcccgcaccgaccggcctgggccccgcccccgggcgtgaggcgcccaatgcgcgtgcgcggcggcgtcggcgccagttatttctgtcccgccccccggcctcggctctttctgcgagcgggcgcgcgggcgagcggttgtgcttgtgcttgtggcgcgtggtgcgggtttcggcggcggctgaggaagaagcgcgggcggcgccttcgggaggcgagcaggcagcagttggccgtgccgtagcagcgtcccgcgcgcggcgggcagcggcccaggaggcgcgtggcggcgctcggcctcgcggcggcggcggcggcagcggcccagcagttggcggcgagcgcgtctgcgcctgcgcggcgggccccgcgcccctcctccccccctgggcgcccccggcggcgtgtgaatggcggcctccgcggcggcagcctcggcagcagcggcctcggccgcctctggcagcccgggcccgggcgagggctccgctggcggcgaaaagcgctccaccgccccttcggccgcagcctcggcctctgcctcagccgcggcgtcgtcgcccgcggggggcggcgccgaggcgctggagctgctggagcactgcggcgtgtgcagagagcgcctgcgacccgagagggagccccgcctgctgccctgtttgcactcggcctgtagtgcctgcttagggcccgcggcccccgccgccgccaacagctcgggggacggcggggcggcgggcgacggcaccggtaagtacgaagtgatcggtgccacccctccccctactctctgcctttgattccgactgggtgcagagatgaggatgccacctgggcgagaggatgggggcccggacagggcacgggaaatactttctgggtcctgcatacgaacgtgggtttgtgctggccgctgagatgggacatctgactaaagttggagaaaagaaggctcggggaggggaggggctggttcgctgcgggataatggtcgggggcccacccagcaggggaatggtgggggccataacctgggtgggaacttgtaacagtctcccacatccctgcttctcgaagtggtggactgtcccgtgtgcaagcaacagtgcttctccaaagacatcgtggagaattatttcatgcgtgatagtggcagcaaggctgccaccgacgcccaggatgcgaaccaggtgcgtcctatctcagcaaccacaaggaggtttctggggagggggcatctgcgcaggaggagcttggcaccagctccaggctgttactccactttcccaaggctctgggtgggctgcctaggttgggtcaagggaccaatcttaaatctccggttgtattttctgggatgtaaacgtggatctatcaagttgtcttgccttctctgaccctgcctttgtctggcagtgctgcactagctgtgaggataatgccccagccaccagctactgtgtggagtgctcggagcctctgtgtgagacctgtgtagaggcgcaccagcgggtgaagtacaccaaggaccatactgtgcgctctactggtacatgaggctgaggggggctgttggagttgttctcccatgtgtgccctcagttgcttttatgatgttggttgcatctggtggatgggtcctagagttctctagggggtgccgcccgaagggcccgagggcagaactccagaagcagaaaaactggggttgtggtgtgtagtctctagggcctaggtgggagagggtgggaaggggaaataagggagaccttaatgtgctgcagggaggtacaaagggtttgagaaggcttatcagggagttgtcagacctggtggtgaagggctcagcatatgcaaacagggaaaggcatggtgtgaagggctttctgggtttgtggttccctggcacacatctggtataagatgctgctagggaaagtagactgtgggtccatggattataagtgatgatgatttttggaagtgttttagcttttgagttggcagagacttacccaaagtttggtttggcatttccagcttttcacagacacagctagctttggtttggaaggagcttgagagtcttttgagtctagccaagttttggggccagaatcctcccatgagtggccttttggtagccatactgtgattcttcccatcccagaggacagcattggtggaagatagcgggaaggtggtggctgtggggcctgagcagccaggagggatacgcaggggctgcagggtgtcctacattccagacgtcccaggcaaaggtcagggtgcaggaatgagtggcattggggaagtcagtttccccaatgagccctgatgctacatattttggatttggttggtatgtgggaccagtgtgtttgatcagttttctaatggggagacaggctttggaggttattaatgggttggtctttgggtgggattatgctgagcaccaagattctgctctagagggggtgtgaccaccattctgagggtcctggtttgacatttcatctctcccagtatgagaacctctacaaggtttcctctgggcccttggattgtaagagaccctggtgttctcttgtcagggaagagggaggaagttaaccatgaaaggagaagaaaaggaatccagggtggtgtgtaggcagaattctgagtatgtccacttggagaagtgttcagtaaagggaacagtgtggggaagggtcagcgggggtggggggtggggtggggtggtcctctttttctagacgctgttatccttacccttacattgttgttatctctagaagctagaagaaagggatgtgtttctcagctatgttggggcagaggattctgggagcaaggagttgggcttgcaggcctgtgttcttccctggccacaccctctacatcttcccaataaatggcccagtgtcacagaacaggccggaaatgaggccccaactcattctgcttcctgagttgggggtggtgaagggcaaggtccagccttatgattcccactccccagggccagccaagtctcgggatggtgaacgtactgtctattgcaacgtacacaagcatgaaccccttgtgctgttttgtgagagctgtgatactctcacctgccgagactgccagctcaatgcccacaaggaccaccagtgagtcccaaggcatagtggttgggtgggtgggtgccaccccttccgtagcttagtgctcaggaacacatctgtctgctctcaggtaccagttcttagaggatgcagtgaggaaccagcgcaagctcctggcctcactggtgaagcgccttggggacaaacatgcaacattgcagaagagcaccaaggaggttcgcagctcgtaagtgtgggttctggggctgtgggggtggcccagggcagcaagaccctacctagcctgacctgctgtgtcccctagaatccgccaggtgtctgacgtacagaagcgtgtgcaagtggatgtcaagatggccatcctgcagatcatgaaggagctgaataagcggggccgtgtgctggtcaatgatgcccaggtaagccttgtgccggtgagaagggtccctgagccccctctgctgattgatgatgctgtctggggtgaggagtgatcctagtattcttctgccttctctgcttacctcatacaccttctatctgcagaaggtgactgaggggcagcaggagcgcctggagcggcagcactggaccatgaccaagatccagaagcaccaggagcacattctgcgctttgcctcttgggctctggagagtgacaacaacacagcccttttgctttctaagaagttggtgtgtactggtgggctcctggctggtgggttccaggcaggtggttcccaatacctcaaatccctatttgttgttggtgtgctcattctttcctccctttcactcccaaccagatctacttccagctgcaccgggccctcaagatgattgtggatcccgtggagccacatggcgagatgaagtttcagtgggacctcaatgcctggaccaagagtgccgaggcctttggtgggtccccagctttacctcactctgttattaccccacgtgctgcacctacttacgtttctctcttctttttgcaggcaagattgtggcagagcgtcctggcactaactcaacaggccctgcacccatggcccctccaagagccccagggcccctgagcaagcagggctctggcagcagccaggtgagcaggagagaggacccaggaaggggtgggcagggaatggggtccagtagcaggagagaggacccaggcagggggggtgggcagggaatggggtccagtagggttcctgtcccactgaggcagagggttctgctttgttcacagcccatggaggtgcaggaaggctatggctttgggtcaggtgagtgggtctgcctagtgggtggggaagggccccagtgctgtttctaccccaacctgccagtcttctttctccattttctaaggagatgatccctactcaagtgcagagccccatgtgtcaggtgtgaaacggtaagtatggcacctcccctgggggtgaggtggatggagggtgggggtgtactcatgccaggttgctgcatctacaggtcccgctcaggtgagggcgaggtgagcggccttatgcgcaaggtgccacgagtgagccttgaacgcctggacctggacctcacagctgacagccagccacccgtcttcaaggtcttcccaggcagtaccactgaggactacaaccttattgttattgaacgtggcgctgccgctgcagctaccggccagccagggactgcgcctgcaggaacccctggtgccccacccctggctggcatggccattgtcaaggtaagcctgtcccaaggaactatagctgtaggatgaagcctgtagtccaggtctggaccctgttgaacacccctcatcaccaccttgcaggaggaggagacggaggctgccattggagcccctcctactgccactgagggccctgagaccaaacctgtgcttatggctcttgcggagggtcctggtgctgagggtccccgcctggcctcacctagtggcagcaccagctcagggctggaggtggtggctcctgagggtacctcagccccaggtggtggcccgggaaccctggatgacagtgccaccatttgccgtgtctgccagaagccaggcgatctggttatgtgcaaccagtgtgagttttgtttccacctggactgtcacctgccggccctgcaggatgtaccagggtgagtgtgaggctggtgggggtcaagtctgggtgttgggctgtctggacaggatcatgtgcagacccttattttcttcaccctagggaggagtggagctgctcactctgccatgtgctccctgacctgaaggaggaggatggcagcctcagcctggatggtgcagacagcactggcgtggtggccaagctctcaccagccaaccagcgggtgagggctggggttacttaggtggggttgcccagagaggctttataggtgctgcccagagctgtgacatcccttacaatgtttgtagaaatgtgagcgtgtactgctggccctattctgtcacgaaccctgccgccccctgcatcagctggctaccgactccaccttctccctggtgagtcctaggatgggaaaggggaagggggtggtggctgctgggtctcgccctcaacctgtgcatgtatatgtgtgtctttgtgtgtgtatgtgtgatctctgcctgcaggaccagcccggtggcaccctggatctgaccctgatccgtgcccgcctccaggagaagttgtcacctccctacagctccccacaggagtttgcccaggatgtgggccgcatgttcaagcaattcaacaagttaactgaggtgagccagtggaatggagaggctgtgggcagggggagatgtgaaggaaagaactaggacccattcatccactgcattcctgcttggcccaggacaaggcagacgtgcagtccatcatcggcctgcagcgcttcttcgagacgcgcatgaacgaggccttcggtgacaccaagttctctgctgtgctggtggagcccccgccgatgagcctgcctggtgctggcctgagttcccaggagctgtctggtggccctggtgatggcccctgaggctggagcccccatggccagcccagcctggctctgttctctgtcctgtcaccccatccccactcccctggtggcctgactcccactccctggtggccccatcccccagttcctcacgatatggtttttacttctgtggatttaataaaaacttcaccagttcctcaggcgttggctggttgggggactgtggtcctggggcctggtttattgactgtatctactagtcagccttatcaagcactggtggcacaagggaggggggtcttgtcccccacctatcgaagcccatgtgtatggatgcctagggagtggggaagactgcctccttgccctttctgggtatggggagggtcacccagggcaaaggatgtacacactagaggcttgttgggtaccctgtgggatactgggtaggtgtgacctacatccctgtgtaggcagggttagccccaggtgtagcacagccactctactgaatgcttcctaaattttggtgctgtagctgtttctcatcttcagaaggtcccacagtgaactgagaccttccagatgtggtttttttccctgtctccctttgctgagtccacttaacattatcattcatctctgtgttatgatttagttactctacagtcgagcctgtgtgaatcccaaggccacccccttgcctctattggttggtctggactgtccttgagtgttgtcattaaaccatcactggaccaaacagtgttggacactacagcctggcagatgaggcctggactctcaagatcctaccagggtgtttgggcagtccagtatcttgggagaggtgatggagaagggcccacagctcacctgaagctcccagctcctgaaaatcccaggtggactttgcttgttcacccctgccccaaacccccacccttagcttagtaccaagtgcctcttgccttagtgatgcccatcctcccagggaccccagtctggtcccacatcaggccaaaagtcacatgggcctggagactagtgtcaaatctcttttattacagaggggttgtggtaaaagatcctgggcatccactggttatctcggagtggcaggggcactcagtccctccgcaggttcttaagccgttcctccaggtctgcatcagcatcagctagggctgaggctgcggcctctgcttttttcccaccagcagccacactaagcgagcccccagttgaggggaggtctgcagagaaagtgggggtttgagcaggtggggtcaggcagcggaggggagtaatgcagggaaagggagggcttggagctgtggctgggccttgggtgggaaatggggtccaggatttggagcactcactcgacagctcatctgttaggctaagtcccagctcatccagaacctgggacaccacagcatcactagggaagagagagaactcagtgagggctatgcactccgtgagggccaggcaaacatctccaccctcccatccagtttccccatacctctcctcttcatcttcctcatcacccatggcatcatcaatggcatcattcatcatctcctccttcatatccatgatctctgcctgccgctcaaactccatcatgatcttctggatctggggcaacttcagctggaagtgacaggagtgtgagtgtgatccccatgggtcgtgggagtgggaagggggattgggaaaagcgcacctgtctgttcatggtgcccatggccttggtgacacccttcatggcttgtgccatcgagttgttggacttgagtgtctggatcttgagggacacagcctggatgttggcccgcatcaatacaaacttgcgcacatagcgccgggtgcgcaccaagtcttttgccatgatgcgaacagcatcctgcagagtagacaagggtatcaaggacacaggaatgagattatcctacacttcttgacaccccattagttggttgtccctccccaccagcccaatttgcaattccacttgaagtttccagagactctggctaacccaatggtcactggtccctccctccttctgacctaaccctcctctgcctcttgggccaccaactccctgggctcctttgtaaggtcctcctcacttctcttgatctgtaaatggtaaaagaaaggccccaggctcactcctgagggttccttttccctccatgttttcagtcattcttttgacttacaacagccattcctcaatttttattcccagcctagacaaagaatctgtctcttccttcacctgatacaaacccatacctcgaactatccagaatcacatacagacctatctgaggctcagcttttgatttcctctccaaacatctttcttgcccatcccaagaaatggtatcttctctgcctacctgttcaggccaaaaccctctcacccatcaaaggctgtgttccttcttcatgctctccctactggttccggctgtctcttaccagcctcttggccatagcttatagcttacccttaccttttttttttttttgagttggagtcttgctttgttgcctaggctggagtgcagtggcacaatcttggctcactgcaaactgtgcctcccggcctcaagcgattcttctgcctcagcctctcgaatagctgggataacaagtatgcaccaccatgcccggctaatttttggtagagtggggttttgccatgttggccaggctggtctcgaaatcctgacctcaggtgatccacccacctcagcctcccaaagtgctgggattacaggcttgagccatcatgccgggccagcttatccttatagttaactggtttttttttttttttttgagacagagtctcgctctgtcacccaggctggagtgcagtggcatgatcttggctcactgtaacctccgcctcctgggttcaagagattgtcctgcctcagccctgctgagtagctgggattacaggcgtgcgccaccatgcctggctagttttttttattttcagtagagacggggttactctgtgttggtcaggctggtctcgaagtcctgacctcaggtgatccaaccacctctgcctcccaaagtgctgggattacaggtctctgagctactgcgcccggccctgtaatccctaaccttccaacttagctcccactttggcccagagttctgaattgtctggtccatgcccaactcttgaagctcacctgtcatctcccatttttttgaggctcttttttaacatttgctgctctgtctgcttaacacattccctgcccagatctgtaggctcactctcatcactcaagccttggatctcataccagttccttggaggcagccttccagaccctcaaactagggaagccctgctgacctttcactccactcgttttgctgaaagcacctgtgtttggtgtctggtctctcttgttcactgctgttagagccgtgcctgattgacagcaacctgcccgaccacccacactcaccatctggccttgcttggccatcttcttaatgtctgcaatgattttcttctcctgggtctctagtttctgtcgctcgcggtccagctcccgcatggcacggttcagggccctctggttctgccgcagtagctcctctggcgtcttccggcgcccgaacaataggtccatgatggtagaagctcactggcaggcctgagacagatgtgagtgaggcccagttgtagggcatggggcccaggagggcaagaagcagaacagggtcacgggagccttgccaaatgggaaggggctaacggagactggaggcaggaatgaggagccaaaagggagcagctgagaacactgggattgtcccggggacacataaagggggacaggtagacctgaaaattatccaagtgctggcccgagcccctccttcatcgccatgccccaaaagaagttatggcttgcaagttcagcttccctctccagaactatgggtgaggccctggagtccttgatacgactgagagcgggggatgacgcgggccggtgcactggtgttttggagactgtgggcaccgaggacagagcaattgtgggggttctgatagaggaggacaggatgggcggaaacgctaagtaccaagaacaggtgaatgtggggctgtgaagctcaggacaaggcattaggatttggggaccctgaatgctgagggagacggttgggggcgctggggcatcctgtacactgaggacgggatgatggagattcggtcgcactatacaccgaggacagtcagtgggcccggcaccaaagcaaggtggtgttggagacctcgatgttgacgacagggtcccagggagaagcgaggcaccggacacccgggcgagtagaaggcctcgtacgctgccgcccgcacgcccgcccgggatccacggtccagcaggggccactcaccggagctgggacggacacccgtttccgcttccgggtcacgcttctctttctgggatccccgacttgcccaccaactaaggcccctcggtcctgtcgccgccgccgccgtttccggattaaacgacgtgacgtaacatgccccgcccgcacccggaaggttgggaaactccaggagcgcgcgtgcgcccgtgccccggaacgggccagcgtccgagcgcatgcgcaacagctcccgtttcctctgcgcgtccgagtgtttcatgttttgagtcccgcccgagtgacccaagccagtaccggggtgggcgctttccacccaacctccacttgaggacccagcttattcgtgagaccttgacttctgcctgaggcctcagatagaaggagcctcagaaggctcctcctcctcggtgggcccacccacacaagaaaggggcaaagctagagatggcttgtttcttccactttgctggcctcttggccaggaagccacaggtcactggatcctgcctacgcttctcatcctagagtaggcttcatcccaaccaaccccaggcacagtcatggtatccccaccaactttagagctgccccaggcactgggcagcctgttgtagggtgctccaatgccacctgtgaccacaccttccaccaccccagctttgcaggccctaatggacctcagctgcccctcccaccccatagaagtaagaagcagaggccatgcagtaacattcccctttaatagcctggtgggacctccagaggtggaggggtgggttgcctgggcccagctacccaggcccgttgcccacccactccacagcccagagtgggggctgaacaagcacccagcaggggggctagacaagccaattcatttcccatcgctgagtgggtcgggggaggcagcgccgaccttaatcacatggtgttaaaaaaaaaaaaataactaggggcacgtggcaggaaggggaggcaaggccaaggcaggggattcccccaccggccgccccccaaacccctacccatggcccccaataaatatttgcaggggatgccagggcttgtggccgtggcgggggtgggtatgcgccaaccctatttcaggcagcgctcaaagtaggtggagccgatgtagccaccccgcatggagcgctgcacgttctgctcaaacagccgccggttgttctgcaggacctctgcggcctccttgttcagtgggtcctcggggttgggctcctgtggccagtacaggtagggggggtcaacaggccagagggacagaaggccaatctccccagacccaaccacctattcctactcaccaagaagagatactgcaggccataaattatggagtttatcgtaaggactggcttccagtcctctctgtggacagagagcatcagggtcagggcttggtgagtgggagactgccacaggcccctctggtgttgggcaggtcagatccagggcataggagagtgagcatgtgagaggctgggagggagggtgtggagcaggacaggccaaggagaaaaccaaggtcaggccatgaggaagatgactgggaaatcaagaaaccacagacaacaaaggggtgggaagggacagagtctgatgtagtgcccacaagaccatgagggaggcctggcaggcagcgctgaggagggcattagagggccagtgtcctcacctgaggatgttgaggcagacgttgccctcgaggtcaatgttggggtgatagaccattgtctcacacttcaccttggggggatcatgcgggtaaccctggcccacctggctccaggaaaagaaaagagagatgggtaggtgcctggaagggcctcagctgctgcctcctctgtccagggagccatccctgcccgcctgggactcaccttaaaactgaacacaaacttcccactcttgtagaagccctgggaggaaaagggggagaagaaaattttagggttccatcctgtggggcccgatgggcagaacatgtctccctcctctcagtggggacacccttggtttgctcctgggaattcagccatatgcaccctcacctcatcaggacagatgaccagcttgaagttgaggaggtcgtctggatctgagaagctgatatcacacgtcttgggcaggttcagctcgtttatgtctgggtttgggtagcagagagtcgggaacagaaagagggaggggaagagagagagagagggagccagcaggacacttagggcgggtgtttgttagcagagcccccatcgtctcctcctggacccccaggcgcctctcctgggctgtgctccacacctccagccctctccctgctccccagcttggctcttgtggatacacagcataccccaaacatgcatgttcagctgtgtatgcgtgtcccaactcctggcccagggtgacccccaacttttctgtatccacagctcccaaatgcccccactcccaaacatcctctgaccgccctaaaccccaggctccccatccatgacctccactctacagtatctacctgttcacccaaactcaaagatcctgcccacccccaccaaccctcagtcctcactgtccttcctcttctctgtctctcagacccagctttccatgtgacccccacactctcaagtccccaacccccgccaccctaccccaccccctctgactctgaggttcacagcacaatagcctaaatttcccctcacccctgtctccaatccctggtactcattaaccttccctcctccacctgtcaccccaaaccccaaattgctgtgactcaggcaggcccatgagtccctggtcctccaacctacttcacccgtttgactcagagattcccagagaccccagcataataaactaaatcctcttccactcatatccccaacccctggcctctactatccctctcttctccgcctgtcaccccaaacccaagttcccgtctaacccccagactctcgagtcgtcagttcctccactccactgcctgactctgagattccgagtccctagtagcagacaccaggccttcctaatatcctaaaccaccacataccgggcccctatctctgaccccctccccgtgactgcatgatcccaaccctcaagacttgacctccgaccccccccacgctcggggcccttcacctctgaccctcagcaaccgcattaccccttcctgactcccacatcaccctgcctcaggccctgacctccgacctccggctccaaccccatcccctgaccccctacccttctggatccgcagctgcgccgccgacgccttcttgctgctgcccttggtgccgcccgccgactcctcctccttcttctgctgcttcagcgagaacagcttgatcatcctgccgccgccgccgccgctgccgccgccgcggggcccgggaccccggccacccggccccccgccgccgcccgcgtcgcctccgctcctcggacccgcagctgcggcctcctccgctgctgccgccacccgcccggcctgccgcgccgctccgctcctctccgcgcccaccgcgcggcccgcctcggctcccgtagtccggctccggcctggcccagcgcctcggactcgctcggcagcgctcggccaaattcggctgttctcgggcccgcccggccccgcccccactgcccggggccgctccttccttgccctcgccaactctggtctcaggccccgctgcagctgcggactcggggctcccccgaccgtgccgtttggccgctcagctgatccctccgcgagggggtgcggctaggggtgggaggaggacacggcagctgcggtgacggcgggcgggtactggaggatcgtcttccgcggcagcagcggctttagcgcggaggtcggcaacggcctcgggcgccccgccgcttcggatatttccgccgcctgcccgctttggctcttcccgcccggcctgcgttgtgcgcctgcgcagccgccgcaaacccgcgttgctcagcgatggagtttggggttcggcctccttcggctggactcgggcatttccgttcatggagatgacgcttcggcggccttgcaggtcacttccggcgactttcgcggggccgggcaggaagcggagttagtcgccatctttgagtggggcagacgtgggccgcttttgctcgcggtcacttcatcttaagttgtatatatgtgcagagcgcggcgcgggtggtcacctccgctgctgccgccacccgcccggcctgcctttgaccctatgggtcacagacaaggcagggtgatcgcggcaagaccctgagtgagactagatgcgttacccagagggtgcgaggtcgagtaccttccctgtcccatcgcaaacccaaagatccccgttcctggagattctgattgaggtaaactaacaaaacatgtattgtgccagagagtggtaagcactgtggagggttacagtggtgtaggggaagacctgtcggggtggacacttggggaacgcgacgtgggggcggaatcgggccgctattggcgtgggcctcaagttccagcggacacgcactgcagcctctgcgcttcccccactatctggaaaaggggatggaggcgggggtcagcttcccatccaatcacagctcagcgtgcctcggagggcgggaggaaacggaactctgccggtcagcgacttccggccgtcaccacggaaactgccagccccgtgagcgcatggtgtggcacttgcctgcggaggggcccaggcgccactcctctgattctgcagatgctcccccaggagtggcttctggccaaggccaagccccttctttgaaactgcctttcagcctgtgttacctgcacccaagtcacccactggagggttgggggagaggggctgtgtgaaggacctggacaatgggatggaaggggaagatggctagggcaaaacaggcaatggcactgggtcctggagacgctgccctgaagcctgcagtatgctgaacttatgctctcagcatctgtccactttcacctaagctgcgtttccactggtttgctgctgaatctactcctgactgaaaccttccaatgtgcatggggccagggtgggagaagccttcagctctagcgatgggaatgatcaccacagggcagggaaactggcccagggcctgcagcctttgcttctcagactggctggggttccatctgcagggtcctacaccctcatcacctgctgcttgtgaacacgagaacaggaaagtcttgaaaaatctgaatttccaggtgaaatcttctagttttaaaactaggaaatggtttcctaggtgtaaaggagttttacaaagacatcctgaggcagaatctggatcaccaggtgtcagtttgctcctgctggatcgcataatcttggttggctagggagattctggcctgtctgggtcctttcctggggtttggcttggcccatggcccaggggacagccgtgacagggtgtggaggggagcatgcaggttgcaggcatcaagtttaggcacagtaccacccacaaacctgggggttggcagatccaagtgggatccttggctcccagctgtaagaagtgctgtgaccccactgcttccctttgttcctctagtactaagggtgagatgctgaatgtccccatgagtacaactcttcagcgggtactcctactgataggtagataaaggtagaaagctttggccgctcaggaccactttagggagtagggtgctgttagggtaagggtagctgtacagctgagctggggtgggagaggtagtatcatgggaatgaatcattaacgctgacttggagcaaggaggactggtgctcaggaggctggtaacctccctgaggattgagtgttctcccagcccttggaggccctggtctcagtgtcaagggaaaatcccatgggatttcatcaccagacaaggctgggctccagacctacccacctaggcatcactgtgcagggcagagactacaaacacctctcttcacttgcagatctgttaagggcaggctggaacaggggttggaaagggagaagagactaggccagcaccacctcttccccttggcaacagcaggtccttccaggagcaacagtttttacatacctcccagaaccaggctcactgggccccttggagacacccacaccagtgccccctcaggagtctcctaggcctatggggcaccctcttgagaacagagacctccagaccagctgagcagtaccccctcaggcccacagggcttccctgccagctaagagaccccaggactggctcagcagtgccctcttctcaggggcctgagttccagctccatgggaaactcattggagcttctaagttgcaatgcttccctttgttcctctagtcctaagggtctagctgcttcctgcaggaactttcccatttctaagacagattgacttaaccttctcactctcccatcaatcacctaacacctagttagctgtgctctgtctcttgatgggactcaatcagatcaggcatggcaccatgctatgcacatatgtactcttggtggatgctcacagagaacatttcttcctctctgggtttgagaaaccgaggtccattgcccagggagagctgaagctggactgcccagggcagttctgccccacctgctgctggtccattccctctgtaaactagaagctgggtatagcggccatcccacacgcggggtaggtgatgctaggagccacctctctcagggtgaagaggggtgttgtggaggtgaaccctcacaggaaccacgtggttacagagggagcacaccagcccagcactcggggggctggagggtggggagtgaaggacgcacaggtagggaggcactgagtgggtggagacccagtttccatctactgtttattggacacctacagtagccaagccctgggcggacctgcttatacttatgtaatcgccagcctcacaataaccaggggaggtaggtgttctgaccatggcggacacagtgcgtcccggctggagctactcggcgctgtggacgcgctggtgctgaatgagcttggtgctctggtggaagcggcggccacagtcctggcaggcgaagggcttctctcgtcggtgggtgcgcagatgctgcgtgagcgtgggccgctggcggaaggccttgccacactcagggcatgcgtagggccgttcacccgtgtggatgcgccggtgctgggtgaggttggcgtgctgccgaaagctctggccgcactcggggcaggcgaagggccgttcgcccgtgtggatgcgctggtgctcggtgagccgcgagacctgcgtgaagcccaggccgcactcaccgcagtggtagggcttttcgccggtgtgtgtcctctgatgacgcgtgagcttgaggcgctggctgaagcgctggccacactcggggcaggcaaagggtttctcgcccgtgtgtacgcggagatgctgcgtgagcgtaggccgctggcggaaggccttgccacactcggcgcaggcgaagggccgctccccggtgtggatgcgccggtgctgcgtcaggttggagcgctgccggaagctctggccgcactcggcacaggcgaagggccgctcgccactgtgcacgcgccggtgctgcagcagcactgagcggcggccgaagcgctcgccgcactcgacgcagccaaaggacttgtcgcccgtgtgtaccgcctggtgctccagcagcacggcgcgccgcgcgaagctctcgcggcactcgctgcacggaaaggggccgggaggctcgggcgcaccaggaggggccgggggcttagcgccagggcccgggggatcgccgtggatgcgctggtgctgcagcagattggagcgctgccggaagctctggccgcactcagcgcaacggaaaggctgttcgcccgtgtgcactctccgatgctcttccaggcgcgcgctgcgcacgaagccctggccacagtcgccgcacacgaacggccgctcctcggtgtgcgtaagctggtggcgcagcaggtgcgagctgcggctgaagctgcggccgcactcgctgcacacgaatggtcgctcacccgtgtggatcttctggtgcctcagcaggttgctgcgttggctgaacaccttgccacatacatcgcaacggccgcccctaaccaccccgcccccagtgctggggcggccccggctccggcccctgggggagcgccagcgggtggtgatcagagcagggcccacaccccggcagggatcctcgtccgtggggtcctgttcactcctcagatcgctggggagcagaagcgcatgcgcaaagccaccttcgcgggagggtgattggatctggccagaaaggccagccatgccgaggtcccaggggacgtggaggtgagggcttacactacctggacctgcggagatgctgcctagctgcagcgcgaaccctgcatacacaaggggaccattcattcatgacagaatgcccaccgtgccgggacccacttcatccctggggacacagtgtgaactacagggacctgaaactgaccaaagaggcagacggaggcgacaaatgcaggggtagggattctatctgtacagacttccctgatgaggtgataatgagacagaacccagcacaaggaggaagactgggctatgtgaaaaagctttctaggtctgatttaggttggaaaaaatcgtttttggaagggctgtagggcaagcgtgggggcattgtctaggtggaaaatgatggtctcagcaaatgcagggaagtgggtgggtctcggaggctggaggtggagccaacagaaagagggtgcaggctcctggatagtggtctggggtttggatgtgccttgcttgtgatgtctgtggggcatctgaggaacacagacttcatgaaggctgtggggaaacgtgagcaagggctctagggcatacacatggcacacagaacccgggcctgcaagtgatcaacacaggggtgggtatctacagaggagagaagtgggtcccagccacactgtgagcactccagcgtcagacgctgggtgaaggaggaggcaccagcaactccaactgagaatcagggcctggagaaggcggaagcctggaggaggttaaatcaagaagactgagagagcagtgagggcttttagtggtgagagaaagtccataagtcgccaaagaaaagtcagataaactagaatacatcaaaggaaatcagcaaaaaccacatcagagtcaaaagacaaatggccaaaaaacaaaaaaaattaaaaaaggacaaatggcaaaccaaaaaactctccacaggcaaaaggctaattaacctcctaagtaaagagctacaataaatcagtaagaaagatcaataacctcatagacacatgggcaaaggatgtgaacaggacaggaaatgtagctaatgcttatatcccataaaatacactccatctcctcctagtaagaaaaatgcaccttagggctgaactcatctgccatttccacaccctgactgcagggacccaagtgttcctatgtattgctggtaagcataaatgggaagacagtgtggtaaaatccatcaaaacagcaaatgtcccacactttgttcaagtaattcaatttttaggtacttcttcaacagttgtgttcctccttgtactaagtgacctacatacaaggttttcaatggtgtgtccacagtgagccacagtggggttctgtgtagctacccaaagatgtagagcacttgctgctgtgtacttaagttggaagatgcacaaaaaatgccagatgtggaacagggtggagaataagcatccatgtgtgtgttttttttttttttttttttttttttttttttttttgagactgagtcttgctgtgtcgcccaggctggagtgcagtggtgtgatctcggctcaccgcaacctctgcctcccgggttcaagcgattctgctgcttcatcttcctgagtagctgggattataggcgtgcaccaccatgcctggctaattgtttgtattttttttttttttgagacgtagttttgctcttgttgcccaggttggagtgcaatggcgtgttctctgctcactgcaaacctccatctcctgggttcaagcggttcttctgcctcagtctcccgagtagctgggattacaggcatgcaccaccacacccggctaattttgtatttttagtagagacagggtttctccatgttggtcaggctggtctcgaactcccgacctcaggtgatctgcccacttcagcctcccaaagtgctgggattgcaggcgtgagccaccgcacctagccaattttttgtatttttagtagagacatggtttcaccatgttggccaggctggtctcgatctcctgacctcatatgatccacccgcctcgccttcccaaagtgctgggattacaggtgtgagccaccacgcccagcccgtgtgtgtgtgtgcgcacttgagacggagtctcgctctgttgcccaggctggagtgtagtggcgccatctcagctcactgcaagctccgcctcccgggttcacgccattctcctgcctcagccacccgagtagatgggactacaggcgcccgccaccacgcctgactaatattttgtatttttagtagagacggggtttcgccgtgttagccaggatggtctcgatctcctgacctcgtgatccgcccgccttggcctcccaaagtgctgggattacaggcgtgacgtgccgcgccgggcccatgtgtgttttaaaggagaggaatggggctgggcacggtggctcacgcctgtaatcccagcactttgggaggccgaggcgggtggatcacgaggtcaggagatcgagaccatcctggctaacacggcgaaaccccgtctctactaaaaatacaaaatatttagccaggcgtggtggccggcgcctgtagtcccagctactcgggaggctgaggcaggagaatgtcgtgaacccgggaggcggagcttgcagtgagtcgagattgtgccactgcactccagcctgggcgacagagtgagactccgtctcaaaaaaaaaaaaagaagaggaatgggccaggcatggtggctcacgcctgtgatcccggcactttggcaggcaaaggtgggcggatcacctgaggtcgggagttccagaccagcctgaccaacatggggaaaccccgtctctactaaaaaaatacaaaattagctgggcgtggtggagcatgactgtaatctcagctacttgggaggctgaggcaggagaatggcttgaaccgggaggtggaggttgcagtgagccgagatcgcgccattgcactccagcctgggcaacaagagcgaaattccatctcaaaagaaaaaaaaaagggaatgaacatgtgtctgggaatgtctttgcttctgtatgtacagaatctttttacaaagacacataagaaacaagcagtgttggctgctggagagtaagactgtgtggcccaggcagggaaggggcattccactgtatactgtcttgtgccttttgaatttcctaacatatgaatgtattagctattcagaatagtctcctgatgaagacataaaaagacctctctgagccaggtgtggtgacttgagcctgtaattgcagctacttggaaagctgaagcaggaggatcacttgaggtcaggagttcaagaccagcctgggcaaaacagcaaaaccctgtcctttaaataaataaagcaagactccatttcataaataaatagatagatagataaacctctctggctgcaaagaaaaggcacagttttattcccaagactcttttttttttttttgagactgggtctcacccccattgcccagactggtgtgcactggcaccatctcagctcactgcagccttgacttccctggcttgggtgattctcccacctcagcctcccaagtagctgggactacaagtacgtgccaccatgcccagctagttttttgtattattttttagtagagacagggttttgccatgttgcccaggatggtctcgaactcttggactcaaacaatccacctgcctccgcctcccaaagtgctgggattacaggcatgagcggctgcgcctggctaagaagattctaaaaactcaggagttggaggtacctggtacttctggccatgcaagtgaatgagcagggcaccagccaggctggagaggctgtttcagaagcagatgctgggcagggctgctgctgtgggctctgtctgcacagaattctgagccaacagtatgcactgccatgacttacttctggatttcttctcccatcctggcagaaggctatgttaagggtgagaaaccgtactgagaaagtcagggttattaggtaaacagtcccattggatgctgagatgttaatctctttcccaaggatgctggcaggaggctgaagttaccttcttgcaggattcagacgatggaacgaaacatgcttggaggaagagtgcccccaaaatggcctagccacattgccctatggatctgtttgcagcatccactcatactcaagctgcttgctcacataccctaagaaaagggtctccttggggagtggggttcccctatgtcccttccagccagtaagccccacatctacctgctcagagctgtcagccagatttgtggtgcccctctcttgcatataagccaacaactaggagagaatagagaacacactgtttttttttaaaaagttactgctgttctcagagaaataaggaaagacattgtaaatgaaagaacaacaggagacagctaaaaagatgaacattcagagaataaaaacactcttggaaagtaaaaatatgctacaagagaccagatgaagtagctcatgcctgtaatcccagcactctgggaggctgaggtgggagcatcacttgaagccaggaatttaagaccagccctggcaacatagtgagaacctgtttctacaaaaaaataaaaaaattaaaaatgagtcaggtacagtgacacatgcctgcagtcccagatacttgggaggctgaggcgagaggatcacttgagcccaggagttcaaggttacagtaagctatgatggcaccactgtgctctagtctgtgtgaaatagtgagaccccctccccccaccaaaaaaaaagctaccagaaatgaaaatcttaacagaaggtctgaaagatacaagtgagaaaatttccaggaaaatagagtagaaagacaaaggaatggaaaattggagtgaaaagataagaacattaaaggacccatcccagatgccaatagccaagtaagaggcatcccagaaacagggagcagagcaatagaagggaaggaaataaaaaaaaatttcaaggcagtttcccagaactgagagatgtgaatttcaaactgaaaaagctcaccaacaatagtgataaaaaaaggtctgtgactgtactaataaaaagaattcttccagccaaacttcaatctaatgttgagggctagacaatgtgtttcagatatgggacatgtcagaattttatcttccacaccagaacacccacaaagctccaccaaaacaaaggtgtgaactaagaaagaggagaccctgggtctcaggaacaggaaggaacataacagaagatgggttgtaggaggagcctggatgatgccagacaaaggtggtggctgagaggtagatggcagggggcctctggtccgtaatgcttcgatgattgggcaggatccctatcctgtgtcaaggtccctcctgcccacctgctctgtctactaacctgctgtccttgtcaggtcccagccctacctgtcctgatgcctgaccagcaggatgcaagcccaggaggccatccaggataccaggactgggagagaatgtgggtacggggaatactcgccctgcttgcaaaaggttttactagggtggggagtttctagaaagtagaggggctgtgggatcagtggtagtggtgggtggctttttttgagggcagaagatgctagaggaggttgaaccttataggggatgatctagggaatgggggaacttggggatgctggagtaagagggctgcctgcgtagggccaggagtggggtcggcagagatggtgctgtccatgcggaaggcctagtcccaccacaccccatctcacttacctggggagaagatgcccccagcttcctcatgccacagggccctggggtgctccctccatgagggaccctcaggcccagtcttgctgtggggaaagatctggtccagcacggtcccacatctctgaaatcacagtggtcactgctcctctgtgcctggctgggctcagggagggacctacctgaccccacccagcaacttccagggaaaggaggagaacatggacctgggcaggacttacctgggcctcctcaggcaggagggtgggtacagactcctgggtggcagctagaggcccagactccaggaaatctagagaggaaaactggtatcaggcagcctgagtgagtttccaccccactgcccttcttagtggtgtgccaggtgctgggatgcagagaggtgggattcttggttgtgggcttgggttggggagggcagtgcagggtagctgagggcccagctcaggggctgggtgaagcagagtaccctggaaggccaggggttgagctgcagtgggatgagatgggctgaggtttgtgcccctgtagccgtatgtgaaccatggggcaaggtggtcagcgggggtcagaggtattgtacaagggtccacataggaatggcagggtgtgagcagctagttcaggtgccctgcctgggaggtgaaaggggtcatacccctaacactacgaggtcctccctcagcagctcctaattatacctctgcctgctgtctgttccccagtgacaagcacatattgcctaacgcatctccttggggactgaacaccacatgccatctgtactgggaaaccccaacagcctgctccatgccatggggttcgtgggtacagggctgtggcagtcaggcttggtgtgtgaggggtagtgacagcactggctgcggtggaggggagacctgactgggtagaatgtgggggctgctggcagatggaaaccattccatttataacaaacctggcccagtggacttcagactgactgctcaggccaggttccctggcccacccaaccagaccttaggcgcgcccaccgtgcatgccctcacctgagtcctctgtaacctctgactcctctttcacctgcaggcccagtggtgattcctgcatagtcctaggaggtgtcttgggcccaggctctggagttggaggctcagtttcaggtaggggctggaaactggagggctccatcttctctgataggacctcctggccctgcacctggactgtgacctggggaggtgcccccaccatcagaagtcctaccagagagtaaggctggccgcaacctggggtttgtgggtgcccatcccactgtaggatcccaggggcctgccttgtaaatacctactgactaggtcctccaaggacctacctcccctaggccctgagcaaagaatgaagggaccacctgcagtccctcccctgctctgacatcgtggccttccagtaccttccccatattcccctagcctgcagctcctatgtccacgtgactgcaggtgatgcaggaatgggctggggagtctggccctggaatccctctgccctgggcagccttgcacagggtctctgttgcaggtggccacttctgtaccacaagggagaacgtgtgtctggcaaagcgtggtgctgcccagggtgaggccgagctggatgatgctccagtcctgaaccccactcgtggacactcactcacccatctccggggtccgcccggctcccggcgcagcccatctactagggcagcagcctcctcggggctgcctggccgctgcccctgcacacgggcctggatctcagggggcagtgcgcccaggaactgctccagcaccaacagctccagcatctgctccttggagcgtacctctggacgcagccactggcgacacagctctcggagctgggccagggcctcttggggccctgtggcctcctcatagcggaagcaccggaaacgcaggcgtgcagcttcagggcctgggtcccataaggcagcctcaccctcctcctcagagtcctctagcttcaccatgacaggcccctcatcttctgggggtgctcggtctggggagcccagcaccgcaggcctcatagagggtaccaggtcaggtatctgaggccagtgtctgcccctggtgaagaaataggatgaggctgttgcaaaaggagtacagtgaatgcttcactgcctagtctatgctgtaccgtttgatcctcagacctaccccatgtggaaggcagatgaggaaacaggcaaagaaaggccatctacaacccacagacttatgcagctggaagccctcccttagccacctgtatccctggtcttctctccgcttgggcctgtgcaaagtctctgacagtctccctgctccaaacacaggcttttttttcttttctttgagacatgctgtcagtcagttgcccaggctgaagtgcagtggcgagatcatgcgtcactgcagacttgacctcccgggctccagagatcggcctcccaagtagctgagacaacaggtgtgtgccacgacatccggctaatttcttaatttttctgtagggatgggatcttactatgttgcctaggctgttcttgaactcctgggctcaagcagatgatcctcttaccttgacctcccgaagtgctgggacttacaggtttgttccaccatgccagcccacaggctgttttttaggactagaagacacttctctcccctgtatccttcccttcttctacatgtgcaacctcattcctgcgctacagctctctctttaccaggtggatggcacctatacacctacagcctgggcatcagcatcactgctggcgtctccccctacccaacgccagcccttacttcaccttctattctctcatctacttcgatgtggctcctcatttgggccccaccatcattcccctccctgcttggaagcctcactccacctaatcctccatgtcaacctgtgcagtcacttgtatggctcagctcccaggcagcaccctctctccctactcagccccatcttctaagcccaacatcacactacgcaatgccccatctcagcttcctgatttagctggggttggaaggggatgggggagcttcgcaatgggtgggggggcggcaaaggctccaagactgccggaacaggagcctgcaaggaagtcccgagactctgattccgcccatcttcagatcactgtgccttcgagaacttgtttccccatttgcaagtggggctgacctccctcctcgcgctgttccttctgcagctgcggctttaggaaggaatctgcgtttatgaaggggatggcaccgcagaatcattcccccgtgggtggcatcgatttcgagggccgcctcatcctgggggccaagcctccactcttcaaggtgccaagtcaacctgaaaccctgggagagacttgggtcatagccaagatggcaggtacctacggagggtcccgaaatacacttcccagaagtccaggcggcaacttccgctccagggtgccaaggtaggtccagacgacgcctaggcaaccgggggcggggctcccaaagcctgtcgtcgtggcaacgagtagtgattgacaagcctctcgctctagccctgggcgctcccgcaaggactgcccggattcgttccccgcgcttccggtctcactggggagccggaatccccgagtctgcagccaccgcccccgtccacacgatagccctcccggttaagaggaccccgccctcacctctgcgctcagcgggccgctccgcgctcctgagcacgcgcagtcttcgacttccccctcccgctggactacgtctcccaggatgctccgcgcaccagctcgagcgcctccttgcccttcccccaccctcgtccccgtttctacaccctctcctcccttcccctagcggtggtcgcaatgatcaggtcatactcctggccgcttcttcccatgctccccgcctcgaatccgtgcgtcggcatgcgcaagcctctcaggtacaacagacggcagcaccgcctaccagatcgcgcatgccccccaccacgttttcctcacttctctacgggccttcctgagattagcaggatcctgcaccaatcacggccgtcattagaactccgtcggtgccccaccgcgtctccatggcaactccctacaggaaggggcctctgctacttcctagaccgcaaaatggagaaaggcttggcccgatgctttccggcagatgtagtcagcaggcccttcgtgtgtacgtgcgcgcgcggcgcgatgacgttcctctgtgatcatgggcgaggggcgggccctgaacgtctccatggtaacctggggacacgactcgacatcgcctgggtaacccggagacgcggcgggcgttgaaaatgcaatggggcatgtgggatgaagaggtggggaagggtactggggcagagagatgccgatcgatagaaacagcgaggagagacggagagagaccagagactcaagggcaaagagagacgaaggaccggcgggaggaagagagagagagacagagagacagactcacagactgggaggaccggagactcgacgcgaggagagacagtgaaaataagtgaacaaacatagagacacgggtccaagttataagagggctgagtggatcagagggtcagggccgggcaaacaggtgtcagaacagttagcaagagagaggcagatcagaaagggatgcagatgaaagagacacaaagaaggaaacgcagaatgggttcacagagacaagaaatgcagatatccagactcaagaggtagacaagaagggagagggacagaaacaagaagggagaaaagggacagaaattagagatacagtaagatggattgacagttttcgaagacctagagaaagatgacagcacgaagagagacagggagaatccgaggtaaaactgttaggaaaacttaggagtccagatgctgtccagttatatgctaccctgtacaggttgataggttgcaaatgctttctgtccagtgtatcgctttgtagctcactaagcagttttgtatccaactttgtgcttttatttcagtgtttttctttttctttctttcttttttttttttttttttttgacggagtctcgctgttgccagactggagtgcagtggcacgatctcggctcactgcaacctccgtctcccaggttcaagcgattctcctgcctcagcctcccgagtagctgggactgcaggctgctccaccacacccggctgatttttgtatttttagtagagatggggttttaccatgttggccagactggtcttgacctccagacctctggtgatccgcccacctcggcctcccaaattgctggaattacaggtgtgagccaccgcggccggccagtgtttattcttcctttcctgtcttcctagaatcatcttgctgcttccctcagtacggtaaataaatcttttgacacatgctcactgagagtcatgtttttaactgttttgaaattatatttggcagtctgaagggaacctgttctccgggctaggggacaaacagggaaaaagaaaatagtggccgggcgcggtggctcacgcctgtaatcctagcactttgggaggccgaggcgggcggatcacgaggtcaggagatcgagaccatcccggctaaaacggtgaaaccccgtctctactaaaaatacaaaaaattagccgggcgtagtggcgggcgcctgtagtcccagctacttgggaggctgaggcaggagaatggcgtgaacccgggaggcggagcttgcagtgagccgagatcccgccactgcactccagcctgggcgacagagcgagactccgtctcaaaaaaaaaaaaaaaaaaaaaaaaaaagaaaatagtgacacatacccaggaaaggaaggaggaagggagggtgatgtaagacaaagacattaggcggcgagaaagccagcctttggtcagaagcagcttctggcgcccctggctggactctgtgcggtgcggcctcgttgccaaactacattttccggcagtacccgggacgccgggcgcagagcggagagcgtcgcaaggggcgggcctgacgcagcctcctccctgcccggccgtcgccaggcaaccttcccccttcgcggccgagatggaccctgggctcggcgtcctccggaaaactgcactgtgaggcggggcgatggggaagggccgaagccccgccagcccagctaaagcagacggctcgcactgcgacccgaaggtgaggttgatcggccgcgctggggccccggcttcggggcaggagctgcagcccctcctcttggttcggtcggggaactgggatatgaggccactgtgtccgcagctggcacgcacccgagtgggccaatcggagccttcggcggccccacggctctctgggaaatgtagacccgctacacgggacggtacccgcctaagaccatactgcgcaggtgctgatctgagtctgggtccctcctgggtcgaggagttctttggcccagatctgcgtggaggcgtgttcgcccggccctaaggtcccttgcgggccttctcggcctcacagcgcgtgtccgctgttcgttccccttccctcctctgtcttggaaatgtagtctcgagggaggagcttggtcatccacccagacttcgtgaggcccccgggcttggggctgcctgttgagagtgggagggagagaatgtgtgaatgtgtggatgaattaatttgcaattatgggagcgcaggcgaaggtgtgaatgtgggagagagaaggatgggcccaagagtggttcagatttcggggctttccccgatttcaaagcttgagtttgagccttccccatgtccacccgcctttccctgtcactctagctgagggccctgtgtgctgtgcctccttgtttcaaggcaggtgcatggtccatggaggtactcatcataggtgtagtcattccacaaagaacggtcaggcggcatttgttccttttttccttccttcctccctccctccctccctccctccctccctcccttcttccctccctcccttcctccctctcttccttccttccttcctccctctcttccttcctccctcccttcctcctttcctcccttcctcctttcctcccttccttcctttccttccttcgttcctgtcttttttccttctttccttccctccctccttccttccttccttcctttccttcccttcctttcttctatcttttttttttttttttttttgagatgggagtcttgctctgtcgcccaggctggagtgcagtggcgcaatctcggctcactgcaacctccgcctcccgggttcaaccaattctcctgcctcagccccaccgagtagctgggattacaggcacacgccaccatgcccaactgattattattattattattattatttattattatttttttgagatggagtcttgctcttgtcgcccaggctggagtgcaatggcaggatctggcctcactgcagcctctgcctccctggttcaagcgattctcctgcctcagcctcccaagtagctggaattacaggcgcacgccaccatgcccggataatttttgtattattattattactattttttttgagacgaagtcttgctcttgtcgcccaggctggagtgcagtggcagaatcttggctcgctgcagcctctgcctcgcctccctggttcaagcaattctcctgcctcagcctcccgagtagctgggattacaggcacccactaccatgcctggctaatttttgtatttttaatacagacatggtttcgccatgttggccaggctggtctggaactcctgacctcgtgatccgcctgcctccacctcccaaagtgctgggattacaggcgtgagccactgtgcctggcctgttcctgtttttcacaagcacagtttttaaaaaaaatttttactgttttgaccaggtgttacattcacatggttcaaagtgtaaaagagacaaggtgagacagacgcacaataaataaataaataacggtgggggacggcccctgtctcataaggttgtgtttgaaaagaactgcagaaggtgaggggaaaaagccatgcagataacagggaagagtgcctgctctgggccaaaggaaccataggaacaaaagtccctttgtagctggcacagtggctcacgcctgtaatcccaacactttgggaggccgagacaggtggatcacttgaggtcaggagtttgagaccagcttggccaacattggtaaaaccctgtctctactgaaaatacaaaaatcagctgggcatggtggcacacaccagtagtcctagcacctgggaagctgaggcaggagaattgcttgaacctgggaggcagaggttgcagtgagccaagactgtgccattgcattccagcctgggcggcagagcgagactctgtctcaacaaacaaacaaaacaaaaaaagcccctttgctctgtctggaagatgtggtcaggagtgagcagagtagaggaggaggctttgagtcttacaaaggaggcagtgaggactgtggcttttacttgaaggcctgggagggctccaacagaggtcaggatctgacttagtttcactgaatcattcttgatctggtatggagaaccatcatccccttctatcattgggtactccacggtggtggtaccaattagggacggccctgcaggatgtacctgggtgtcctgccacctgccatctgtgtctgggtggagccccagtgccctgagagcagtgaggaggctatggcgctggtggaggacttcacccagatgttgaagactggtgagccacaggggtccaggggttggccagagggataggggaatctatgagggatcacagctcatgaccttgggccctgagtgtctccctccgtctgcctaggccctcaatatccctgtcttggggaggaggacctagaagctgtgacgcatttggagacttctgcagcctctgagccccccaaaggcatgagcttgaggttgatgtgacttctcctctcttggggtagaccaggcttcctttcccatccttctttccttccccgcaaggtcactaagtgcctgccatatgccaggccctattggtccagcagggaaagacacttggcattcatggagcctagtctggttggagaaatggaccatgagaccatcagtcacaatttaggtatcctttccctgaaggaggtgggggaagaggaggtgagcacagagactggcctggcagggagcagctttgtagttttcagtgtctaacatcttcactgtgagcttgggttccacacgtgtgtatgcgtttgtgcttgggagggggtgacaactacaagatatgagagaagggtggttacagccaccattcatcctggcatttgttcctctgttcactcgattgctcatgcatgactgtgcagtgtcttctgcctacgcgattctctgtcaggaggtagaaactatatcacctttttttaaaagcacacctttaccaagttataattgacataccaaaaaagtatacaattcaggtatttttagtatattcacaaggttgtacagctatcaccaccatttaataccagaatgtaatcacaaccaaaagaaaccccatgcccattagtagtcacccatcagccccctcctctaagctcccggcaatcactaatctgctttgtgtctctatggatttgcttattctggacatttcattaaatggaatcatactttatgtggccttttatgtctggcttctctcagagcataatgttttcgaggttcacccatgttttaacatgtcagaacttcatttttatgagcaagtgatattccattgtatggatatgacccattttgtttattcatgtattctttgatcagcatttggcttgtatttacttttcggctattatgaataatgctgctatggatgttcatgtacatgtttttgtttggatgtttgtttttatttctcttggttgtatacctagaagtggaattgctgggtcatatgataacactatttgaccttttgaggaactgctaacacaccacttgttttaacagagggaaattaaggtaaaaaatgttaccgagatattgaaggagtaaaaaagtacaaaaagaaccctaagatgtcatgttggtaggaacttcagggaacaacatccattcctagagctttatgaacaaagggaagaggttgggtttagtctttgagagaagctcaaaggaggggaacgtggtggtgggggcactgggatccagatccctggggaggtgttgctgcgggctgacgctggggtctccacagagccttcatgaagctgattctacacatactggaatagctgcaagctggtttcagctactgctaaggggattgaaagccttgcttttgcaggactggtttttccttacacatgaatatgaggggcgggggagacatcttggatgcatatatctatagtcactgtggggtgttgtttttttttttctgtagtgctgggctctattttctttccttccttccttccttcctttccttccttccttccttccttccttccttccttccttccttccttcctcccttccttccctctttctttctttctttgatggagttttgctcttgttgctcaggctggaatgcaatggtacaatctcgcctcactgcaacctccacttcccgggtttaaccgattctcctgcctcagctcccaagtagctaggattacaggcatgtaccatcacacctggcttattttatatttttagtagagacagggtttctccatgttggtcaggctggtctcgaactcctgaacttgggtgatccgcctgcctttgcctcccaaagtgctaggattacaggcatgagccactgcacccagccatgggctctgttttctaagcatgtccaccagcatttgaggcatagtgtctcctgaacaatagctagcatatgcctgctctttaaggactagcccccagttctggttcccagtgtcccattgaacagatgcctagataatatgcactctaaatagggattttgggctgggtacgatggctcacgcctgtaatcctagcactttgggaggctgaggtaggtggatcacctgcggtcaggagttcaagaccagcctggcctatatggtgaaaccctgtctctactaaaaatacaaaaattagccaggcattgctgggcgcggtggcttgcgcctgtaatcccagcaatttgggaggctgaggcgggcgtatcacctgaggtcgggagttcgagaccagcctggccaacatggtgaaaccccatctctacttaaaatacaaaaattagccgggcgtggtggtacgcaccaataatcccagctactcgggaggctgaggcaggagaaatcacttgaacccgggaggcagaggttgcagtgagccgagattgccccattgcactccagcctgggggacaagagcgagacttcatctaaaaataaacaaaaattagccaggcatggtggcgggcgcctataattccagctactcggaaggctgaggggggagaagttagggttagggttaggctgaggggggtgatttggaaacccgatgttcagtgtgaggggcagggaaagcttataaagtcctagtgtgtttacagaagcttgctgcattcctgagagtgaagttagtttagtgtatggggcaaacatccactgggaagtgagccctgtgaccctaatatggcccgaatctgctccttaaagagagagacttggtaaattatctttaccaggtgttacccaagcctgtcagcactccccaccagtaagccttgtgtcctcattttacagcgcgagtcatggctggggccttagtggcaacaagtgctgagatcagcgggctcagtagcaggaacacaagcacccccttgcggtgtctggaggaagcggcgcggacagtctcccgctccaccgtgtcgggcctgaagaggccgctgaacgctcgcgattactgaggcatctggtaggatcgcaaggccatcaacctacaggtgaagctcgaggcgctgtggcgctttgaagccggagagaagctcagtagaatcgggaaggcgctggggctgtccaactccaccttggccaccattcgtgacaacaaggaaaagatctgggcgagttcccaggaggccacactgcaggcggccaccaagttgacgcgtggccgcagcctggtgatggagaacatggagcagctgctgagcatgcggatggaggaccagagccagcgcaacatgcccctcagtgtggtgctcattcgggagaaagcccacagcccgttcgagaaccgcaagcaggagcagggcgagggcgcctagcccgagagcttcggggccggtcgagggtgattcgctggctttaaggcgcgccacagcttgagcagcatcggggccagcggcccaagaacgcagcgtgcaagaatccagcgttaatgcgcagggtgatcccggagggcggctacacactctggctggtgttcaccatgaataagctctggctggtgttcaccatgaataagcccaggttcctctgtaagcgcctgccgagaggacgttcattttcctgtggaagatgagtcggcccctgggtcaaagccgccggagacctcctgaccctattgctcggtggcaacgcagccggcgacttcaagctgaaggccctgctggggtacccctcggagaacccgtgtttcctcaagggctccttcaagcccaacctgcccttggtgtggtgctcgcacaagaaagcctgggtacagcctgggtgacagagcgagactccgtctcaaaaaaaaaaaaaaaagcctgggtaaccatgagcctcttccaggagtggttcctgcacttctgctctacagtggagggcgctgcacccagtacgaccttccctacaaggggctgcccatcctggacagcactcccggccaccctgggtgttgagacagagtctggctctgtcgcgcaggctggagtgcggtggcgcgatctcggctcactgcaacctccgcctcccgggttcacgccattctcctgcctcagcctcccaggtagctgggactacaggcgcccgccaccacgcccggctaatttttttgtatttttagtagagacggggtttcaccgtgttagccagaatggtctcggtctcctgaccccatgatccacccgccttggcgtcccaaagtgctgggattacaggcgtgagccatggtgcctggccctttaattcccccaatatttttttatctgcattaatttattatttcaagtgaacttccatctcaaatacatggttctcagacgcttccatgaactctcaagtgtgacttattacagcctggggctccttggagcacagtgtgccagtgacctagtggaaggccatgagaaagccaggttcactgttcactgtgcagcatctccctccatggtcttcctggagcctattcccactgcactgagcattccgtgtgtccagaggtagggttagcagggatagatggacttcctgcttattttctgttcacatttccactgaccttcaatcctgtagactgcaaagattgagccagctgagcccccaaagagactcagcagtgcagaatgtgggcctgagtgggaggactgcccagccgcacaccttccagctctgttcttcccgggccctggatgcttcttgccacgctgtcctctgaaatgacgctctgccccagcagacctgtggtaggtgagctagtgaggaagcacacctgggctcttcccaccaggcatcccagccctggtgtggggtatccgcatggttgcaggcatcccctggccaggcctgggtgctcattctccctctctcttcttgtctcctcccctctccctgctttctctgccctgtcctcctcctttttgctgttttcccccggactcctgccatgcccccagactttctttttcccacggatatgggctcattccaaggaaagggtggcatttggacacaaggccctagatcccacgatggaggactggggggtacctgatgcccctcagaaagaggcctgcagggacagcacatgggaaagccccatggctttgtgatccatctggggatgtgatccatttgggtaaggacttgggtttcagggcatgagttggcttccttgcaggatgcaggtccttaggtgggtggcctctgtctccagctgtagggccctgccaggaagcctctatatgagcctacctccctcctgcaggaccagagaggggttgttatgaacagcccaggggattggttgcactaagcttgtcttgaagctttggctggggagtccaggtgcccatgtctctcacctgctccccatacacatctctgcacacctggctgaggcattcccagacctaacctcagataatgtgcatgtgatgaacactcccaagtggctaggcctcttgcacctgagcaggtggattctgccccagcactggggctttctctgggctgtccatcatgggtatatctctggattccaggattgctagttagcacctcacatttgagggtctgtgctattcagtctagaatcagagttggatgagaaatcaactttgaacaccacctttggggtggctgcattggctcacacctgtaatctcagcactttaggaggctgaggcaggaggatagcttgaggccaggagttcgagactaaccggagcaacatagtaaggccacatctgtacaaaaaaaagaaagaaaaaattacccaggtttggtggcatgcacttgtagtcccagttgtgggctgaggattatgcaggtgacaaggcaagagactgaaggcacaaactgtttcagtataataaagaaaatagaataataatagtcataattatatatagagatgatcatgaacaattatcaatcattataataaacattattaatcattagcttttattattactctttgttgtgttactaatataacctaggaataaacggtgtgctgaagggacattgtgagaagtgacctagaaggcaagaggtgagccttctgtcacactcacataagggctgcttgagggctccttggtcaagtggtaacgttagtgtctgggacagcaccgttacttagcagaccacaaaagggagtctcctttccttgggggagtgagggaacactctgctccaccagcttcttgtggaaggctggatattatctaggcctgcccgcagtcatctggaggccgaaacccctccctgtggtgctgtgcttcaatggtcacgctccttgtccactttcatgctcctctcacactcctggttcctctttgaagtttgtagtagatagtggtagaagaaatagtgaaagtcttaaagtctttgatcttataagtgcagagaagaaattgctgatgtatgctgccttctctctctgcttcagctacctaaaagagaagggcccctgtcctgtaatcacatgacttgcttcaccttgtcaatcacttagaagattcaccctccttaccctgcccccttgtcttgcatgcaataaatatcagtgagcccagctgttcggggccactactggtctctgcatcttgatggtggtgttcccccaggcccagctgttttctctttatctcttcgtcttgtgtctttattgattacaatctcttgtctctgcacatagggagaacaccccctaagccccgtagggttggaccctacatctagttactcaggaggctgaggcaggaaggttgaagttgagcccaggaggttgaggctgcagtgagccatgattgtggcactgcactgaagcctgggtgatagagtgagaccttgtctcaaacagcaacaaacaaataccatctttgggtatattaatcagatggggggagtcacactgacatcagttggcacccactggttagtgtgtgccaggcagggagactgggctgttttcagtaaactgatcacagcagtgagctgtgatcgtgccactgtactccagcctgggtgacagagtgagaccttatttccaaaaaaaagagaaggcattggagttcagcttgtggttttgacagagaaataataggataaattaatgaaacaaaaaagttaacagtagaggattaataaaactaagttttttttttctaatttcttttcctttcctttcctttcctttcctctttccctttccttccttcccttcccctccctccctccctcgctccctcccttcttcccttcctacctccctccctccctccctccctcttcccctcctcccctcccctttgtatgtaagtgtagatgagggtgtctgtgccttgtgtttgtatatgtgagtatccacatgagcatgcctatgtgtatgagtgtgtatgtgagtgtggtgagttgcttctgtccacacatttgtgtatatgagtgtgcatgcaagtgtgctgagtgtgaaagtgtgcctgtagacatgtttgcctgtgtgtgcgtgtgtcaaacacagctgtttctgtgtgtgagtgtgccttatctgtgtgtgtgcacgtgtgtgtgcacgtgtgcacgtgaatgtgttgagtgttcctgtgtgaacacaggtgtgttcctatgtgtgttatgtgagcatgtgcatatgtgtattctcgagggctgagggacccagccctaccttcagcacctgctaactgtccccacacccacagcgggcccagcacagggatcacattgtcggggtgacctggatcctacttgaagcctttgagctggactgtggctttatccctgaggccaggcttcatgtccagatggccatgccagaggttgacgtggcagagaaggagtgtgacacaggccagtggagcgagtggagccagcctgtgtgcttccaggctccccagagacaaggtgggtgcttctgtggctgctgcacttccagaatctgggctgggtgtcttctcccatgatgacctcactcctccaacctttcacactcctggaagcccctccctgaggcagccatgccccagttgacttgcttcctctgaaggtctgaggtctatagggaggacacaagctcctgccctaacacatctctgcacacctggtggtcttaggttagggttagggtcagggtcagggtcagggtcagggtcagggttagggtttagggtcagggtcagggtcagggtcagggttagggtagggttagggttagggttagggttagggtagggttagggttagggttagggttagggtattgtaaataatttcacattactaataataaattattatttgtattacactattacgtaatgtaaaggctattaagacatgtttgtcttcaaagaatggccttggtttctgtgggcagtgtcctcatggaaaggtaatgcgttcctgctaaatcatggacaaaacgggcttccaggagctacaggctgcagcagcagcttctcctctacgtccttcactgcctcatactgttgttgactttgaaagcttttttcagtctagttttatcaacagagctagtattttcatgaggttctactacataccaggttccagaaagctaaatgccttttgtttgttattattcactaaatagaaatcacaactctctcctcattactcacacaacaaaatttagctgagggagactgagtgactgtcccagggtcacacagctactaagagcagagtcatgtttagattcatgtgggaatactgaacacagacatgaaccagtggaaacatcctacgttccaaaagcctactcaagccatttgttcttattttaaggaaaatctttatgctaattttaaactccaaatacttatgaatggcagagatctacagatttgattctgatgtaagaaatgatggtcaccagctggttactgctaccaccccacaaccccgagcatactggacgaatgtctaagccttgtggttagtggggacaatgctggtggagtctgaagttgtcatgcagtgactcatgcaagcttaggcagatttggtgatatatgacacagagatgcaaagaaatgttgtagctgacacacaccggctggctctgggagatgcagaaggagcacgtcacccaaaatagagccagacagacatccttaaggaaagagccaaggggctgcatcttaaagaatgaagaaaggatttgtcatgagagatgggacaggaagttcttgagaggcagagggagattgtgagaatgttgggaagggaggagagattctcgcacatctgggaagctgacaatccatcagcatgtccagaaggaaaataaggaggaggagcagaaatagatgaggctggatatagaagcagggctgaagctgtgtcgattgtggtaaagagttgtgattctatccagaaggcaataggtagcattctaaacagagatcttttaaaacaagagtcagcaaatattttctgcaaggggctaaatgttaaatatttcaagttttccaagccatatggtctctctctcaatgactcagctcttccattataccatgaaagtagccagagacattatgtaacacatgtattggctgtgccccattacaactttacttacaaacgcagactgtgtcagacatggtccatgcatggtagtttgccacactctgttttagaaagctcaggtttatgatgtgatggagaatgcctacaagagctcttgttttaaatggtagagtgaacatacactggaattctatcctgcttgacccaagctcttgatagcaaaaggtagaaaagatagatggtaaacagatagatagatgatagataaagaaaatacatagctgttccagaaaacagaaatggataacttcatgaaccaaaagcagagtaatatactttagaaggaagcaggccagaaaacccacagttgcaaagcaaatagaatttccagctgcctcttgtagccccttcctggaagtagtcacagcccagggtgtttgacttcttcctctgttttttgtttgtttgttgtttgcttttctctggggtttttgttgttgttgtttgctttttttaaaaaaaattccctttccctgcttttttgtcacagtagcctttgtcacttcaaacactgcaagtgttctttaaaaaaaattatatcaacctttcaattaaaatgcaacatgtctgaaacttggtatctggagaggtgagttggacaaaggagcccttgttactgcacgttttcattcttcaaatttcaccttgcacgcagtaacagacagtgcacaaagccacttccttatggacggaaattctgaaatccttttatgcctggcctttccatccttcatcttcccctctctcacactgtgaaggatcgtattggacatttttgttttaatgtcagtgacaggggaacacaggtagctctaatatagctgtgacccagatgcttctgtttctagcacgtatttattttgcagcaaacatttacatccatgatgttttactgtcttttgaaaataattaggcaatatctcatctgaggtaggatgtttctaggggttgtgttctgagggaggaaaactaatctgttctctttccactgcattctaggaacagtaagaggaccttgtgcatgaataatttgtttccacactacagagtgggtaataagcagattagtaaaaacaattctgcttcacttcaataacagcctcctccaactcattttttctcaacaaacttatttttccagcagaagaatcccagacttcttagagaacccagtgactttttgcaccttaaatctgtgaaatcctcatgttttcttctgccgtatccatagttcaaacaaagatgaggcaaagctagatgcattcctgaaggaacccaagaaattcctctctttatttctctggaatgaaatgaattctctagaccaccagttctaaccttcaaaaaccaaacctgtttgtgagatctccttcaaatactactgtagaccccagtgtttattcattaaatttttaaaatatttgttttatttggaatccatgtatttgtaattttagtgtttgtattaatacaagggagaaatgtttaaatctgtctatgccatatgtgcctctggcttattgcccaattaattgtagcctcaggctaaactttggtttctgtctttaatttttgtcagaagaaatataactgatctcaaaacatctgcttttattgtaggggctcgtgctgccatctccattcctctctcttttcttgcaatctgggtggaagttctttaatatgaacatttcaaccaccttcattctaccatgtccactatcagcacattcaaacttatccagccaaggctgtcatcttaggccagggattttttaggaatctattatgctgtgatgcggctggcacccctttgactcactgtatcaccccagggttcttttcatttcagaagcccaagagggcagaaaaagaaataggtgagcaattaaaccctctgagtcaggagcgtctccccttgcgttaagcaatgttgtagaacatcgtgtttagcaagctcctagcagatgagccacgtggctgctgagcacacacgcctgcttgctgctgtgagctcaggcaccatcatcatgtcttttccatctctggagggaattgtaagggccacttaataacctgtaaatcacagagagttaaaggtgcttccccaaaacactgatgacagaatgaaaggtgaggagtgttagccacaggtcacaaaagtgcaggaaagtctctcagtgtgggttgttgaagaaatgcaggtcttttttcttttggaagtctccctagaatggggtcaaggactctgcccattctaggatgaaaaattgggatattagacaccttcagatatttatccccagctttcattttgggctcttaattagtttgttcatccatcacaatctcaaatgctaagcagggcatttgaatctctccacagtgcaaatcagcgccgtcttttaaagttgagtttcttattattctcacctgatataccttatttatcccacacccaccccaataacatatcgtgctcactgttatctttgaggcaacccttgaattttactcagcctggagcgctcttcacgtcttgtccagagccagttcggactcattcttcagccgtgcatcagtcagtgggggctagcttaaactgtggtgacaaacaacctccaaatttcagtggctcaaaaatcttcttccttatttatttacatctcatgactggtcaggtgagaggtagctctgtgctgtgtcatcctaacacaggaatccagaaggaaggagggaccgtcaatgagatccccattgctatagaaaagagaaaaaagcatgcggaatagaacgctgtttcttggagatttctcctgaaaaagtcacatgttatttcttctcacctccatcggcaaaaaaaaaaaaaaaaaaaaaaaagtcatgtggccatgggaaaatttaagtaggtgggatggaacagtcagaatgcattcataaaaaataaactgaaaatatttggagaacagcaccaatgactatcatgaatgccaacttacatccctaacaacccagtgctgttaccctccaaactttttatgtcttgcaaagtattagaacttcatatctgaagccataccactcagagggaatgcaagatacatattgacatctcctttaggatgtccatagagaattcaagaaaagaaataatttaaaagtgcttttgggtacagctatttagcactagagggtaagagtagagatagattgtaaagataataatagggttaggcataggattaggatctgggtcagagtcagggctggaagtatggttagaggtggggtcatggtcagggtcaagatcaaagtcagggttaaagtaagggtcagaattagggaccagggtagggatcaggatttagcttcaggctcaaagtcttgggacagggttagggttagaattagaaccagagctttgttctcaggacccacccgaggatgggtcaccatggctttggagcacctggtagtgtggcatgtccacagtgaagaccagagtttcgttgtccttaagactgacctgggagacgtggctggaggccattgaggaaggtgaggcaaaagcttcctgtctgctccccgtgtgctgaggagggagctctgccatgggctttactttcacacgttatattctacaagtcttgttttacaaaagcatcccttccttgaggcttcggctgctcatcgctgctcatcatcatagcgtgccataacatatagtaagatttgggtttgtttctgggagagatcttggcatagagaaaggagaaatgcttagagccaccatcaagacagttgggatgaaagctggggataggcagaggctggaggaaacatgtgcaccccttgtaaacacttattcatgttttagttattcacttaaagtgttaaattagtaaaaatagtattgaaaaattgaaaagtaggcatattaaaacttgtaacactatttaagcttagatatattatttgtacctcatcaacattttttattttgttgagaaagtgtaaggttaattggcagcatatttctaatagtagatagaataatgtctgttttataaacattgacatcctacattacatgtgtgaaccctgaaaatctgagacagctctcagattttttagaaagtttattttgccaatcttgaggatgtgcgcccgtgatgcctccccaggaggtcctgacaacatgggcccaaggtgatcggggcacagcttggttttatacactttagggagacatgagacatcaatcaatacgtgtaagatgtacattggttcagtccagaaaggtgagaaggccagacagggggcttccaggtcataggtaggtaagagacaaatggtttcattcttttgcattgctgattaccctctccaaatgaggcaatcaggtatgcatttatctcggtgagcagatgggtgactttggatacaatgggaggcgggtttgccctaagcagttcccagcttggcttttccctttagcttagtgattttgattcccaagatttattttcccttcataaggttttcctatgagcattaattattcattgtgtattttatcacacaaataaggcacagatttttaaaaaatcatcaacttcctggctacctatatagacataattacatagaagctcaactaaatttgcaaacattccagagtttgggtttccaataattctttgtgattctttaaaaggtaaagtatttttttcccataaaacatagcaacatttaaaatcacccgtagaatgtcctgccatttttgtttctgtagtttcctcattttctgcaaagcctcgctgaggaaattgactttgaatatccttttacactcttctgttttagaaagcattgtggtaaaacattgaatcatcatggtcataagttctgttcacattctttcttgctttgaatattttttcccagtggccaatatttgattctgttgtatcatggctaaaaggtaggcatggcaacaaaataaagacaggaagtctttggaataagtgatcccatcacaatgaatcaatttgccattggaacatatttttacaaagtcactcttttgaaaatatttagctatgaattaaaacagagtctgtatggttaatatttttcctggtctaaggtgaacagcattttagagaatgaactcaggacacaaccacagcacaagaaaaatgtgataattaagtttacacatatgtgttactactgcaacagaaaacatgtaaagaacatttgatttatgtatcagtctgcactgtttaattttttgtgtcataaatactcttatttaaaaaaacaggactagttaacagtgtcaattactagtaattcatggtataaataattaaacaaggaagtgttcaaaaaaaacagtgttttaaataaagttttattttacatcatcttttttacttacacagaaattgtcaaaaaaaagcagagatttcccatgtagccgcaacctagtttcctctcttattaacatcttctatcagtgtgtctcacatggcttattaatatcttacataatttgtcacagttaatgaaccaatactgatagactattattaattgaagttcatatttcatttggattcccttagttctatcttactctgacccaggatcccatccaggatcccgcatgacatgtagacatcacgtgggctcttcctggctgtgacagtgtgtcaggctttccatctcatgatgaccttcatagcactgaggaggattggtcaggaatgttgtagaatgtcccccattgtcacttcatgttctcaaggtgaactgtcacctttgatgttcacttggatcatttggcagagctaatgtttgtcaggtttctccactgtgaggttatttctcctccttgtccgtactgcatgtgttcttttggagcaagtcactatgcagagcctcactctgtcaggagttggctccaccttcttgacggctgagtgtctacatcaattatttggaattcttttgcaaaggagatttctatgcaactccatttgcttattcacctaggtatacaaatacagacacctagataattactttaagctttagttattattcaacactacagtattatgttgcacaattcattcctgtgttggccatcagtagctgtttttattggctcttatttttctttgatatgttttaatttttttagtacttactttctgatacttccagattatcctggctcctatatttactgtcccagttctagtatcagacatttcttcaaagagcctgattactttcagaatggtaggaaaacttacatctggctgctgaatgagcacattgtatcttctccctcattggcaatgctaggaagtatatgtgtgtgtctaacctacctatacacacctaattataaagttttctatgtagaactgtgtgtgtctatattaaactaaacataagtttacgttgatgtctccacctctgatctactatcacatgaatcattctagccttctcgccttgctaatttgtaacctcccacttcaacagtaagaaacctggttcccaccatctgtgacttatgtaagtcattgttttattccagatacagacactgtggttttacaattgttcacaattgcttctgttggaaagaactttataaaatggaatccaataatgaagtatagttcatgtgccttcagcctacagattctattcattttcaaagtttttacctagatttgtgtcttagtccattttgtgcttctgtaacagaatacctgaggctgcgtaatttataagtaaaacagtttcatttgtttgacaatactggtggctggaatgtgtgagattgggcagttgcatctggtggggcctcagtctttttcacctcatggtggaaagtggaaggggagcaaggggtgcaccagagatcacacagcagaagtgaaagcaagagggaagccaaggaagccaggctctttttaattacctgctcctgcaggaattatctattcctgtgagaacagaactcactcacccccatggaggacattaatctattcatgagggatccgtccccaggacccaaacaccgtccactaggccccaccgccccacactgacacagtgggagtcaaatttcaacatgagtttttgtggggacaaaccacatccaaaccatagtaatttgtagcataaattctttttcacatgatgtattctgtcctgggatactccacatcctgagtaatttgatttaatttgaatagagtttgctttaaccatttggctgtaaaattctgcatatttcgacaaatgcattgtggcagatatcccactattaaagtatcatatggaatgcctcaaacccccaccccatggagccaatggcttcccatctgtgtagtttgccttctccagtgtctcattaaatgaggtcacactgtgtgtatcctcctcagactgtcttcttccacttagcaatgtgcatgcaagattcactcatgtctttgtgtgtgttgatatcttgttcctttctatggctaaatagtattccattacatgaatgtagcagaatttggttatgcattttggggagcagaaccttcctcttctaactttgttccagggttggagaccttcaagttaactgacaatagatacattagtaggagagacaatacttggcttcttgttccccaagcatcattgtgggacaaaattcatcagatggcaggatccagtttacaaagaggtaaaaatagcccagaaacaagaaacaagactagaatctgataactcacaatggctatagttttcctttaaaaaatttttttttgagacagggtctggctctgccgcccaggctggagtgcaaaggtgcaatctcagctcactgcaacctctacctcctgggtgcaaacgatcctccctcctcagcctcctgattacctgggactacaggcacatgccgtcatgcccatctaatttttgtatttttggtagagacggggtttcaccatgttgcccaggctgatgttgaactcctggccttccaaagggctgtaattataggcatgtgccaccatgcccggctgtgttatacttttcctttgaaagataaaatttctctctgtagtaaccatcatttttgatcataatcaaagtaagactattcttgttttaaaaataagtctagttttgttagattttgcttgattatttacgtaagtgcagcaagaacaggagatgaccacgtaggtgctttcaggtttctttgctggaagttttcatacagaatctcagatttgacttttaaaggccttattcaggctaaaagccaagccaagaacatactatcaaatttcagctgcagtccttatagctttgtgtgaattcctctcttcttgaggccccaaaatatccctaaattcctgggcctaccaggaaatgaccttccttactaacctataaggctgtgaaccctgtaatctaggtatcaggctgggttttctcagagtgctgttgggaatgaagttttttatgttcccccccccaaaaaaaagaactaacatgggaacaaatgatctcttagcaaggcgagctttatttttctgcacaaagggtgctactcaatagctgtccagctacaagagcacaccaaacaaaggagacagagttacttataacctgacgtgtctaccctactgctgtgtccagtttccattggctggaataggacctcccattttacactttacccgattggctgttagtttaaaactttcttaattaggtaaggggaatagaagaaagaaagaaaaggaagttgcccagggatagttaaggaagcacctccaaataaggaatggcatgcactatgggctggggcttgtctagttctgtccaggcatgctggagcaagctaggacaagtgatttggaacacacacacacacacacacacacacacacacacacacatataaaaatagtgggtagttgtgactttataatctttgaggaagaactttcctcaaagttttccacagtgctttgtaagcattgtctccataaaagtcaaccttacttccttaaaattgctggtcataactgatcttaggtacactccctaaatatgatattccagtaaaaaccttgataatataaccaaaatttccaattatgtcctgttataagatgaatagattcttattggacttttgctaacaacaatatcatcgtggaaataagagtattcagtaaggatttcaaaattctggaaaaatcaggcaagaaaaaaagataaacgcttcatttctgtttacaaaagtataatctactaaattgttgtaagttacagttagagtaagagaaagagatttcttaaatccagaaactagaatattaaccagcaatgctccaaaaagctatacaattataatcaattttcatcagttcattcagtgccatgtaatcaattccagtcttgtggatcttgagttagcagtgtcatgaacccatcagtttcccaaccggacttctggagaccttaactgagtcaagtgtatggtcttaaagttatttaagcaatatcatcagaagcctataaccagagtacctgtcatagtcttttctgtgagtctcagggggagtcctgtcttggagacgaacattctgacctgtagttgattgcaggagctttcaggaaagcatcagggggaaataatatctaaatgacaaaaagtatgaaatggctgtgatgaaagatctgatgagagttcattataccacagctgacaaggatattcgattttttctgtggcagacaacatttatttatttatttatttagagacagagtcttgctctgtcgcctaggctggagtgcagcggtgcgatctcggctcactgcaagctctgtctcctgggttcacgccattctcctgcctcagcctcccgagtagctgggactacaggtgcctgccatcacgcccggctaattttttatatttttaatagagatggagattcaccgggttagccaggatggtctggatctcctgaccttgtgatccacccgcctcagcctcctaaagtgctgggattataggcatgagccactgtgcctggcacaacatttaaagtaataattggaattatgactcattactctatagtggcacatagcatggataaggaggacattgacaaacttccaggaattttatataatttctgaaaacataacattttacccatacaaatataacacagggaaggttaggtatctctttttatttgtatcttctgtatggttttccttataaaaaatgcaacctactttacttgcgaaacatgccctacttttcttgcatgctttgcatagagttgtttctagttattctattatttctagtagttttatttacatatattgattataattttaatacttagtaatcttttattttccagagaaaactaggaagtagacagttataaactgtcatatattagcattctatagtaggttagaaaatgtatgaatataccatctcccaacatctagagggatgtgtttcctcataatacaattcctcagtgtggcagaaaaaaacatgtttattaacgggccaaaatatctttagtctctctgtaaaaataggaagccaaaagtatataaacttgaattatttatgttcagtaattaatgttttagtattgtatcttatttataaatggtctagatatttaatgcaaatcttttacttagcttaactttaaggttaaaaattaccaaaagtactttggaaactattcttaggcagatttactgtaaacaaattatttttgaaataatgtttttcgcttttcacaagacggcaccgaaagcgaaggaagctcctgctcctcctaaagccgaagccaaagcgaaggctttaaaggccaagaaggcagtgttgaaaggtgtccgcagccacacgcaaaaaagaagatccgcatgtcactcaccttcaggcggcccaagacactgcgactccggaggcagcccagatatcctcggaagagcacccccaggagaaacaagcttggccactatgctatcatcaagtttccgctgaccactgagtcggccgtgaagaagatagaagaaaacaacacgcttgtgttcactgtggatgttaaagccaacaagcaccagatcagacaggctgtgaagaagctctatgacagtgatgtggccaaggtcaccaccctgatttgtcctgataaagagaagaaggcatatgttcgacttgctcctgattatgatgctttcgatgttgtaacaaaattgggatcacctaaactgagtccagctggctaactctaaatatatgtgtatcttttcagcataaaaaaataatgtttttcataagaatgacaacttaattagaatcaaatctataagctttaagattttacgtttctagtaagtataatattagcttatttgactagaactcaagcagaataggaatttatgcttgttttatattcaataatgataattttgaagatatagttgttttattacaccaaaaatactatattaatcttatttaactaagttttatccaaatcatgttaacttaagaaacatttgatcagttcctatatttctaggagtttggtgaatatttatttataaatgcttatttttttccaagccaagttagaatagagcacttttagaggatttcataaatgaattttgtaatgctctctggagttaagaaaatatcacatatacataacatacattaatagatacacaaacacaaatagagatttcatagctttcatcctgaaatttcagccatgaatcaggcataaatattctgatggttaatttcagacatctacttgatcggattgagagacacacatagctggtcaaacacgatttcagccatgaatcaggcataaatattctgatggttaattttagacatctacttgagtggattaagagacacacatagctggtcaaacatgatttcagccatgaatcagccataaatattctgatggttaattttagacatctacttgagtggattaagagacacacatagctggtcaaacacaatttcagccatgaatcaggcataaatattctgacggttaattttagacatctacttgatcggattgagagacacacatagctggtcaaacacgatttcagccatgaatcaggcataaatattctgacggttaattttagacatctacttgagtggattgagagacacacatagctggtcaaacacaatttcagccatgaatcaggcataaatattctgacggttaattttagacatctacttgagtggattgagagacacacatagctggtcaaacacgatttcagccatgaatcaggcataaatattctgacggttaattttagacatctacttgactggattaagagacacacatagctggtgaaacacgatttcagccatgaatcaggcataaatattctgacggttaactttagacatctacttgactggattaagagacacacatagctggtcaaacacgatttcagccatgaatcaggcataaatattctgacggttaactttagacatctacttgattggattgagagacacacatagctggtcaaacacaatttcagccatgaatcaggcataaatattctgacggttaattttagacatctacttgactggattaagggacacacacagctggtcaaacaatttcagccatgaatcaggcataaatattctgacagttaattttagacatctacttgagtggattaagagacacacatagctggtcaaacacgatttctgggcatatctatgagggtgtttctggaagacactgagataaccatgacccaatgtggatgggcactgatatggtttggctgtgtccccacccagatctcatcttgaattgtagttcctgtaatacctacatgtcgtgggagggacccagtgggaggtgactgaatcatggtggtggttaccgccatgctgttctcatgacagtgagtgagttctcatgatctgatggttttataaggggcttttcccctttgggtcagcacttcttgttgctgccatgtgaagagggatagctttgcttccccttctgccatgattgtgaggcccctgcagccatgtggaactgtcagcccattaaacccctttgttctttataaattgctcagactcaggtatttcttcatagctgtataaaaatggatgaatacaggcaccatccaattggttgagagcccagatagaataacaaggaagaggaaaggtgaattatctccttctgaaatggaaacatccttcttctcctgcccttgacatcagaacttcagggtctcagacctttggcctcacaatcagagttacaccattggcttccccgattctgagtcctttgtatctggagtgagccatgctaccagctttcctggttctccaacttggagacaggctattgtggaacttctcagcctccataattatgtgaaccagttcccctaatgaatcttctctcatctatctacatatatcctattgattctgcctttatggagacccctgcctaatgtgattacaataactacaaaattcactagtttatatagaagacttggtttttgtctttgccccattttatatttgtattataactatgtatctggaaaatggaacaagttttttcttctttatatgagggctaaggcttttttctcaccaatatttttggagattttaaagattttctttttttttttgacatagaatcttatggaggctgagaaataattttttttctattttattcttcagccccaggtgtttgcttttgcagattcttgagcacattgagagcctccaaggcatggagtggggtgcctgaagtttcagtgattatagggagttgagagactcaactgggaaaggaaaggtctaaaaggaggcaatttggaaaataaaaattttctcaaaggagccattaaagttgtaaataattcttagtaaagtcatgcaaacaggaaaagaagtagaattagttccatattggtggaacacatagtcagcagaggttggagaagggagaatttagtgaactgagaagttcccatgaaagcagcaagatcaagatcacagagacaccttgaaacaaaaagccaggaataacttccaacccaagaggagaacagagaggcctcaaaaccaaagctaggataagaaacttgtagcccaagagttatcttccagacaaagaagcctgagattccaacgcagcttcagagagtgctcactcaaaatgttactgaaactgtaggctttttaatgacttagccatgcctgcaaaaggcattccctaaggtggcacagaagatggagcccccatatccaaagatagccaaggagaaagaaagacccctgttgccagagccagtgggcaaaggcaacagaaaaggagacaagggtcctaatgggatgagatcctttcggatttaggcttttatacaaactcctgagaactggcaggttgacagccataaatggggtaccaaactttctactcattggattacaagttctcaggcatccagaatgattaacaaaatgacaatttctagggcttctgtgggagagtatggaaaggtctttttgaaccttttaatgctgtcaatggaagaatgatgaggttcataaatttggaaaggagacatttcttcatttttatgcttatttttatttttttttgagacagagtttcactcttgttgcccaggctggagtgcaatggcgtgatcttggctcactgcaacctccgcctcctgggttcaagcgattctcctgcctcagcctcctgattagctgggattacagatgcccaccaccacacctggctaattttttgcagttttggtagagacagggtttcatcatgttggccaggctggtctgaaactcctgacctcaggtgatccacccacctcggcctcccaaagtgctgggattacaggcatgagccacccacccagtgagagatttattttctataaagggttgtagcctgcagggttgtccttctgacaggctgggaagcatagcctccagccagaagccagaaacagatgcttcaaggaggaggtaaaggaaatagcaacttatgctgagtggaatggccaaatagatttatttaataagctctaggaggagtcatgaatatttatggaaggagaaatgcatgcacgcacaattgagtttcttgcttcttcatgggtcccatgtacaaaaaatggcagtgttagcatgatcccagggtggagttttcagccctctgacattaaaaggtgaagcagaggacatgaaaacttgctctgtgcatcctctgtacgctggccagaacctctccatcgtgggtggtctcttatcaggcaagaaaggagaggttgatatcagtagtggaggctttgaaagggctggtttctgttaaatccttagggaagaaagcctcatcatggttagcaaaggagggggtataacgatgtgtatcttaaccccatcatcccatcctagcaaagctgagaactcagttttgaaagttactctggggtcccctcagccaagagtgggtctgttcagtcagttgggagcttagaatttaattttcatttatcaatgctaatgggaaagagtacgctgtcttcatggcagctgaatttgcaagaaactccttggatggggttaatggcagctgtatttttctgggagctgtgctttaattggataaagtaagttctggtaagatttcttcatcttcagtatctcaaatgttttcatttaaataatctttataacaacttttgatgtctgagtggattcccacacagtcatctattgtaagactttctgattccttttttttcctttggtcattatgaatagggcttctgtaaataactgcatggtagcttttgatgggaaataacatcaaagtagttgtcaaaatacctaggaatgttatttttggattgtaaggtgagacttgtttagctttggaaaaaaatgcccaacttgtaataggggaggaaaaataattttctgtttttggaattcttagatggaacgctctgtaaaaactgacagattaaaatgagaaaaagagaaaagtttaaaaacatgtatatcttatggttacatgggatatactcagggaaaaatgagtaaatctccaacaggtggctttcaattcaagcataaatactatcttcaacttaaagaaagaagatttgaggtgcagtagtgggaagttaaccagcaaaagcacattagacaggggtaaggtttgttatacagagttaagtccatgcagtctccattgataagactcttcagtgatttagttatccttctcttcttggtgtcgagagaggtagcttttaaatggtgatttcctttatagatgtaaattttccttacacaagtaacttctactctgttttcacaacttcctttgttagcatttttttttcaaaataattagcttggaataatttttaagccaaagggacatattttggggttgcatattctggtttcctaccattatattttggggtggcatagtttggtcttatacactgtgttctactggcaatgaaaagagttcttgtttttcctccagcaatttgtcatttgttaaagagcttagcagttctaagagatatagaccagctgtgctatctttttgtggttttcagttctctagtatgttgagcatctttttgtaagtgtacttgccatctgtagatcttctttggtgaggtgtctgttcagatctgtgtgcatttttaattgggctgtttaacttattgtttagttttaacaattttttatatattttgaatacaaattctcagatctgtattttgcaaatattttcttcaatatgtggcttgtctttttgttctcttaacaaggtctcttccagagtataaactgtaaatattaagaaatccacattgtcatttcttctgtgtatatcaaccttctgtgtcatttgttaaaattcattaccaaacgcaaaggtacatagcttttcctctatagtttcttctagaaattgtatagttttgcatttttagtgtaaggatgattttgagtgattatttgtgtaagttgtaaagttttcgtctacatgcatatcatttcttatggtttccaattaatcattccctcactatttttgggaaagacacaggatagtgggctctgttagagtagatagctagctagacatgaacaggagggggagctcctggaaaagggaaagtctgtgaaggctcacgtggagggaccaccaaaaatgcatatattagtagcatctctagtgctggagtggatgggcacttgtcatttgtggttaggagggagaagaggtacctacgcagaaacaccctagaacttctcttgagatgccccaatcatcattcactctgcaataaaaatgtcagaatattgctagctacatgctgataagaaggagaaaggggacattcttaagagaaacctggcaccataagtacagattagggcagagaaagacattcaaaagaggcagctgcagtagatacaaacgtgaccgctgtcagcctgcctggtatggcgggaaggaggctggtgccagagtggattcggattgatcaccacacatgtacctcaatcaacagtgaggaggtcccacaaggctaagtggggcaagtcggggacctaaggcagtagcaggaaaaccaaagaaaacaggcggagacttgagacagaggcaggaatgtgaagaagtccaaaataaaaatccctgcacaggactcttaggctgttttcatgcactatgagcctactcctccctatttttgtacaataagctctttacactgtatttcttttcaatgaagttatcttccatctttgtactgcctcttggtgaaaagctgtcttccaagttaataactgggacatcagctctccgcagtaatagctccttttcagttttaatttgcagaactgatggggattaataactggcgctccgactttaagtggtgcaggaggcggccagtaggggacgccagccgttacaccgggagcaagagggccgtccgtagtccccatctgcctgcatgtggcgtgcagcgacgacaatggcagcaagagggcccggcagtgtgcccagctgccagcaggcgggtgtgctgccactataatgtgaggaagagggccctgcaatgtccctagctgccagcaggcggcgtgccaccactatactgcgagcaagagagccctgccgtgcccctgcgccagcacggggcgctggacaccactgtaagcaagagggccctgcagttgtcctagtcgccagtagggggcgcaatggcagagcaccgtgggcaagctggtcctgtagtgcccggctgcaagcagggggcgcccgaaacgggcttttcagattactcaggttcaactcgtctctgcgccgcgccgccggggacgtgtgtctctgcgcgtgcaccgcaccacctccgcgctccccgccgggcggcgcgcgactgtgcgactgcaacactcccagccaccctcagcccagcgacgtgcgtctctgcgcctgcgccgcgcctcactcccgcccgcccagcgacccctcccctccggggaggcgccggcgtgcgtctacgccctgcgccgcgtctccccaacagcggcgcgcctctctgcgcctgcgccggcgcgccgccccctctctgcgcctgcgccggcgcgccgccccctctctgcgcctgcgccggcgctccgccccctctctgcgcctgcgccggcgcgccgacccctctctgcgcctgcgccggcgcgccgccccctctctgcgcctgcgccggcgcgccgacccccccctctctgcgcctgcgccggcgcgccgaccccctctctgcgcctgcgccggcgcgccgacccccccccccctctctgcgcctgcgccggcgcgccgaccccctctctgcgcctgcgccggcgcgccgaccccctctctgcgcctccgccggcgcgccgcctttgcgagggcggagttgcgttctctttagcacacacccggagagcatcgcgacggcggagctgcgttctcctctgcacagacttcggggctattgcgaaggcggagcacagttcttctcaggtcagacccgggtgggcgggctgagggcagtgccagggcggagctgcgttctgttcagcacagacctggggggttagggttaggggtgccgttggggttggggttggggttagggttaggggttagggttagggttagggtttagggttagggtttagggttagggttagggttagggttagggttagggttagggttagggttagggttagggttagggttagggttagggttnnnnnnnnnnnnnnnnnnnnnnnnnnnnnnnnnnnnnnnnnnnnnnnnnnnnnnnnnnnnnnnnnnnnnnnnnnnnnnnnnnnnnnnnnnnnnnnnnnnnnnnnnnnnnnnnnnnnnnnnnnnnnnnnnnnnnnnnnnnnnnnnnnnnnnnnnnnnnnnnnnnnnnnnnnnnnnnnnnnnnnnnnnnnnnnnnnnnnnnnnnnnnnnnnnnnnnnnnnnnnnnnnnnnnnnnnnnnnnnnnnnnnnnnnnnnnnnnnnnnnnnnnnnnnnnnnnnnnnnnnnnnnnnnnnnnnnnnnnnnnnnnnnnnnnnnnnnnnnnnnnnnnnnnnnnnnnnnnnnnnnnnnnnnnnnnnnnnnnnnnnnnnnnnnnnnnnnnnnnnnnnnnnnnnnnnnnnnnnnnnnnnnnnnnnnnnnnnnnnnnnnnnnnnnnnnnnnnnnnnnnnnnnnnnnnnnnnnnnnnnnnnnnnnnnnnnnnnnnnnnnnnnnnnnnnnnnnnnnnnnnnnnnnnnnnnnnnnnnnnnnnnnnnnnnnnnnnnnnnnnnnnnnnnnnnnnnnnnnnnnnnnnnnnnnnnnnnnnnnnnnnnnnnnnnnnnnnnnnnnnnnnnnnnnnnnnnnnnnnnnnnnnnnnnnnnnnnnnnnnnnnnnnnnnnnnnnnnnnnnnnnnnnnnnnnnnnnnnnnnnnnnnnnnnnnnnnnnnnnnnnnnnnnnnnnnnnnnnnnnnnnnnnnnnnnnnnnnnnnnnnnnnnnnnnnnnnnnnnnnnnnnnnnnnnnnnnnnnnnnnnnnnnnnnnnnnnnnnnnnnnnnnnnnnnnnnnnnnnnnnnnnnnnnnnnnnnnnnnnnnnnnnnnnnnnnnnnnnnnnnnnnnnnnnnnnnnnnnnnnnnnnnnnnnnnnnnnnnnnnnnnnnnnnnnnnnnnnnnnnnnnnnnnnnnnnnnnnnnnnnnnnnnnnnnnnnnnnnnnnnnnnnnnnnnnnnnnnnnnnnnnnnnnnnnnnnnnnnnnnnnnnnnnnnnnnnnnnnnnnnnnnnnnnnnnnnnnnnnnnnnnnnnnnnnnnnnnnnnnnnnnnnnnnnnnnnnnnnnnnnnnnnnnnnnnnnnnnnnnnnnnnnnnnnnnnnnnnnnnnnnnnnnnnnnnnnnnnnnnnnnnnnnnnnnnnnnnnnnnnnnnnnnnnnnnnnnnnnnnnnnnnnnnnnnnnnnnnnnnnnnnnnnnnnnnnnnnnnnnnnnnnnnnnnnnnnnnnnnnnnnnnnnnnnnnnnnnnnnnnnnnnnnnnnnnnnnnnnnnnnnnnnnnnnnnnnnnnnnnnnnnnnnnnnnnnnnnnnnnnnnnnnnnnnnnnnnnnnnnnnnnnnnnnnnnnnnnnnnnnnnnnnnnnnnnnnnnnnnnnnnnnnnnnnnnnnnnnnnnnnnnnnnnnnnnnnnnnnnnnnnnnnnnnnnnnnnnnnnnnnnnnnnnnnnnnnnnnnnnnnnnnnnnnnnnnnnnnnnnnnnnnnnnnnnnnnnnnnnnnnnnnnnnnnnnnnnnnnnnnnnnnnnnnnnnnnnnnnnnnnnnnnnnnnnnnnnnnnnnnnnnnnnnnnnnnnnnnnnnnnnnnnnnnnnnnnnnnnnnnnnnnnnnnnnnnnnnnnnnnnnnnnnnnnnnnnnnnnnnnnnnnnnnnnnnnnnnnnnnnnnnnnnnnnnnnnnnnnnnnnnnnnnnnnnnnnnnnnnnnnnnnnnnnnnnnnnnnnnnnnnnnnnnnnnnnnnnnnnnnnnnnnnnnnnnnnnnnnnnnnnnnnnnnnnnnnnnnnnnnnnnnnnnnnnnnnnnnnnnnnnnnnnnnnnnnnnnnnnnnnnnnnnnnnnnnnnnnnnnnnnnnnnnnnnnnnnnnnnnnnnnnnnnnnnnnnnnnnnnnnnnnnnnnnnnnnnnnnnnnnnnnnnnnnnnnnnnnnnnnnnnnnnnnnnnnnnnnnnnnnnnnnnnnnnnnnnnnnnnnnnnnnnnnnnnnnnnnnnnnnnnnnnnnnnnnnnnnnnnnnnnnnnnnnnnnnnnnnnnnnnnnnnnnnnnnnnnnnnnnnnnnnnnnnnnnnnnnnnnnnnnnnnnnnnnnnnnnnnnnnnnnnnnnnnnnnnnnnnnnnnnnnnnnnnnnnnnnnnnnnnnnnnnnnnnnnnnnnnnnnnnnnnnnnnnnnnnnnnnnnnnnnnnnnnnnnnnnnnnnnnnnnnnnnnnnnnnnnnnnnnnnnnnnnnnnnnnnnnnnnnnnnnnnnnnnnnnnnnnnnnnnnnnnnnnnnnnnnnnnnnnnnnnnnnnnnnnnnnnnnnnnnnnnnnnnnnnnnnnnnnnnnnnnnnnnnnnnnnnnnnnnnnnnnnnnnnnnnnnnnnnnnnnnnnnnnnnnnnnnnnnnnnnnnnnnnnnnnnnnnnnnnnnnnnnnnnnnnnnnnnnnnnnnnnnnnnnnnnnnnnnnnnnnnnnnnnnnnnnnnnnnnnnnnnnnnnnnnnnnnnnnnnnnnnnnnnnnnnnnnnnnnnnnnnnnnnnnnnnnnnnnnnnnnnnnnnnnnnnnnnnnnnnnnnnnnnnnnnnnnnnnnnnnnnnnnnnnnnnnnnnnnnnnnnnnnnnnnnnnnnnnnnnnnnnnnnnnnnnnnnnnnnnnnnnnnnnnnnnnnnnnnnnnnnnnnnnnnnnnnnnnnnnnnnnnnnnnnnnnnnnnnnnnnnnnnnnnnnnnnnnnnnnnnnnnnnnnnnnnnnnnnnnnnnnnnnnnnnnnnnnnnnnnnnnnnnnnnnnnnnnnnnnnnnnnnnnnnnnnnnnnnnnnnnnnnnnnnnnnnnnnnnnnnnnnnnnnnnnnnnnnnnnnnnnnnnnnnnnnnnnnnnnnnnnnnnnnnnnnnnnnnnnnnnnnnnnnnnnnnnnnnnnnnnnnnnnnnnnnnnnnnnnnnnnnnnnnnnnnnnnnnnnnnnnnnnnnnnnnnnnnnnnnnnnnnnnnnnnnnnnnnnnnnnnnnnnnnnnnnnnnnnnnnnnnnnnnnnnnnnnnnnnnnnnnnnnnnnnnnnnnnnnnnnnnnnnnnnnnnnnnnnnnnnnnnnnnnnnnnnnnnnnnnnnnnnnnnnnnnnnnnnnnnnnnnnnnnnnnnnnnnnnnnnnnnnnnnnnnnnnnnnnnnnnnnnnnnnnnnnnnnnnnnnnnnnnnnnnnnnnnnnnnnnnnnnnnnnnnnnnnnnnnnnnnnnnnnnnnnnnnnnnnnnnnnnnnnnnnnnnnnnnnnnnnnnnnnnnnnnnnnnnnnnnnnnnnnnnnnnnnnnnnnnnnnnnnnnnnnnnnnnnnnnnnnnnnnnnnnnnnnnnnnnnnnnnnnnnnnnnnnnnnnnnnnnnnnnnnnnnnnnnnnnnnnnnnnnnnnnnnnnnnnnnnnnnnnnnnnnnnnnnnnnnnnnnnnnnnnnnnnnnnnnnnnnnnnnnnnnnnnnnnnnnnnnnnnnnnnnnnnnnnnnnnnnnnnnnnnnnnnnnnnnnnnnnnnnnnnnnnnnnnnnnnnnnnnnnnnnnnnnnnnnnnnnnnnnnnnnnnnnnnnnnnnnnnnnnnnnnnnnnnnnnnnnnnnnnnnnnnnnnnnnnnnnnnnnnnnnnnnnnnnnnnnnnnnnnnnnnnnnnnnnnnnnnnnnnnnnnnnnnnnnnnnnnnnnnnnnnnnnnnnnnnnnnnnnnnnnnnnnnnnnnnnnnnnnnnnnnnnnnnnnnnnnnnnnnnnnnnnnnnnnnnnnnnnnnnnnnnnnnnnnnnnnnnnnnnnnnnnnnnnnnnnnnnnnnnnnnnnnnnnnnnnnnnnnnnnnnnnnnnnnnnnnnnnnnnnnnnnnnnnnnnnnnnnnnnnnnnnnnnnnnnnnnnnnnnnnnnnnnnnnnnnnnnnnnnnnnnnnnnnnnnnnnnnnnnnnnnnnnnnnnnnnnnnnnnnnnnnnnnnnnnnnnnnnnnnnnnnnnnnnnnnnnnnnnnnnnnnnnnnnnnnnnnnnnnnnnnnnnnnnnnnnnnnnnnnnnnnnnnnnnnnnnnnnnnnnnnnnnnnnnnnnnnnnnnnnnnnnnnnnnnnnnnnnnnnnnnnnnnnnnnnnnnnnnnnnnnnnnnnnnnnnnnnnnnnnnnnnnnnnnnnnnnnnnnnnnnnnnnnnnnnnnnnnnnnnnnnnnnnnnnnnnnnnnnnnnnnnnnnnnnnnnnnnnnnnnnnnnnnnnnnnnnnnnnnnnnnnnnnnnnnnnnnnnnnnnnnnnnnnnnnnnnnnnnnnnnnnnnnnnnnnnnnnnnnnnnnnnnnnnnnnnnnnnnnnnnnnnnnnnnnnnnnnnnnnnnnnnnnnnnnnnnnnnnnnnnnnnnnnnnnnnnnnnnnnnnnnnnnnnnnnnnnnnnnnnnnnnnnnnnnnnnnnnnnnnnnnnnnnnnnnnnnnnnnnnnnnnnnnnnnnnnnnnnnnnnnnnnnnnnnnnnnnnnnnnnnnnnnnnnnnnnnnnnnnnnnnnnnnnnnnnnnnnnnnnnnnnnnnnnnnnnnnnnnnnnnnnnnnnnnnnnnnnnnnnnnnnnnnnnnnnnnnnnnnnnnnnnnnnnnnnnnnnnnnnnnnnnnnnnnnnnnnnnnnnnnnnnnnnnnnnnnnnnnnnnnnnnnnnnnnnnnnnnnnnnnnnnnnnnnnnnnnnnnnnnnnnnnnnnnnnnnnnnnnnnnnnnnnnnnnnnnnnnnnnnnnnnnnnnnnnnnnnnnnnnnnnnnnnnnnnnnnnnnnnnnnnnnnnnnnnnnnnnnnnnnnnnnnnnnnnnnnnnnnnnnnnnnnnnnnnnnnnnnnnnnnnnnnnnnnnnnnnnnnnnnnnnnnnnnnnnnnnnnnnnnnnnnnnnnnnnnnnnnnnnnnnnnnnnnnnnnnnnnnnnnnnnnnnnnnnnnnnnnnnnnnnnnnnnnnnnnnnnnnnnnnnnnnnnnnnnnnnnnnnnnnnnnnnnnnnnnnnnnnnnnnnnnnnnnnnnnnnnnnnnnnnnnnnnnnnnnnnnnnnnnnnnnnnnnnnnnnnnnnnnnnnnnnnnnnnnnnnnnnnnnnnnnnnnnnnnnnnnnnnnnnnnnnnnnnnnnnnnnnnnnnnnnnnnnnnnnnnnnnnnnnnnnnnnnnnnnnnnnnnnnnnnnnnnnnnnnnnnnnnnnnnnnnnnnnnnnnnnnnnnnnnnnnnnnnnnnnnnnnnnnnnnnnnnnnnnnnnnnnnnnnnnnnnnnnnnnnnnnnnnnnnnnnnnnnnnnnnnnnnnnnnnnnnnnnnnnnnnnnnnnnnnnnnnnnnnnnnnnnnnnnnnnnnnnnnnnnnnnnnnnnnnnnnnnnnnnnnnnnnnnnnnnnnnnnnnnnnnnnnnnnnnnnnnnnnnnnnnnnnnnnnnnnnnnnnnnnnnnnnnnnnnnnnnnnnnnnnnnnnnnnnnnnnnnnnnnnnnnnnnnnnnnnnnnnnnnnnnnnnnnnnnnnnnnnnnnnnnnnnnnnnnnnnnnnnnnnnnnnnnnnnnnnnnnnnnnnnnnnnnnnnnnnnnnnnnnnnnnnnnnnnnnnnnnnnnnnnnnnnnnnnnnnnnnnnnnnnnnnnnnnnnnnnnnnnnnnnnnnnnnnnnnnnnnnnnnnnnnnnnnnnnnnnnnnnnnnnnnnnnnnnnnnnnnnnnnnnnnnnnnnnnnnnnnnnnnnnnnnnnnnnnnnnnnnnnnnnnnnnnnnnnnnnnnnnnnnnnnnnnnnnnnnnnnnnnnnnnnnnnnnnnnnnnnnnnnnnnnnnnnnnnnnnnnnnnnnnnnnnnnnnnnnnnnnnnnnnnnnnnnnnnnnnnnnnnnnnnnnnnnnnnnnnnnnnnnnnnnnnnnnnnnnnnnnnnnnnnnnnnnnnnnnnnnnnnnnnnnnnnnnnnnnnnnnnnnnnnnnnnnnnnnnnnnnnnnnnnnnnnnnnnnnnnnnnnnnnnnnnnnnnnnnnnnnnnnnnnnnnnnnnnnnnnnnnnnnnnnnnnnnnnnnnnnnnnnnnnnnnnnnnnnnnnnnnnnnnnnnnnnnnnnnnnnnnnnnnnnnnnnnnnnnnnnnnnnnnnnnnnnnnnnnnnnnnnnnnnnnnnnnnnnnnnnnnnnnnnnnnnnnnnnnnnnnnnnnnnnnnnnnnnnnnnnnnnnnnnnnnnnnnnnnnnnnnnnnnnnnnnnnnnnnnnnnnnnnnnnnnnnnnnnnnnnnnnnnnnnnnnnnnnnnnnnnnnnnnnnnnnnnnnnnnnnnnnnnnnnnnnnnnnnnnnnnnnnnnnnnnnnnnnnnnnnnnnnnnnnnnnnnnnnnnnnnnnnnnnnnnnnnnnnnnnnnnnnnnnnnnnnnnnnnnnnnnnnnnnnnnnnnnnnnnnnnnnnnnnnnnnnnnnnnnnnnnnnnnnnnnnnnnnnnnnnnnnnnnnnnnnnnnnnnnnnnnnnnnnnnnnnnnnnnnnnnnnnnnnnnnnnnnnnnnnnnnnnnnnnnnnnnnnnnnnnnnnnnnnnnnnnnnnnnnnnnnnnnnnnnnnnnnnnnnnnnnnnnnnnnnnnnnnnnnnnnnnnnnnnnnnnnnnnnnnnnnnnnnnnnnnnnnnnnnnnnnnnnnnnnnnnnnnnnnnnnnnnnnnnnnnnnnnnnnnnnnnnnnnnnnnnnnnnnnnnnnnnnnnnnnnnnnnnnnnnnnnnnnnnnnnnnnnnnnnnnnnnnnnnnnnnnnnnnnnnnnnnnnnnnnnnnnnnnnnnnnnnnnnnnnnnnnnnnnnnnnnnnnnnnnnnnnnnnnnnnnnnnnnnnnnnnnnnnnnnnnnnnnnnnnnnnnnnnnnnnnnnnnnnnnnnnnnnnnnnnnnnnnnnnnnnnnnnnnnnnnnnnnnnnnnnnnnnnnnnnnnnnnnnnnnnnnnnnnnnnnnnnnnnnnnnnnnnnnnnnnnnnnnnnnnnnnnnnnnnnnnnnnnnnnnnnnnnnnnnnnnnnnnnnnnnnnnnnnnnnnnnnnnnnnnnnnnnnnnnnnnnnnnnnnnnnnnnnnnnnnnnnnnnnnnnnnnnnnnnnnnnnnnnnnnnnnnnnnnnnnnnnnnnnnnnnnnnnnnnnnnnnnnnnnnnnnnnnnnnnnnnnnnnnnnnnnnnnnnnnnnnnnnnnnnnnnnnnnnnnnnnnnnnnnnnnnnnnnnnnnnnnnnnnnnnnnnnnnnnnnnnnnnnnnnnnnnnnnnnnnnnnnnnnnnnnnnnnnnnnnnnnnnnnnnnnnnnnnnnnnnnnnnnnnnnnnnnnnnnnnnnnnnnnnnnnnnnnnnnnnnnnnnnnnnnnnnnnnnnnnnnnnnnnnnnnnnnnnnnnnnnnnnnnnnnnnnnnnnnnnnnnnnnnnnnnnnnnnnnnnnnnnnnnnnnnnnnnnnnnnnnnnnnnnnnnnnnnnnnnnnnnnnnnnnnnnnnnnnnnnnnnnnnnnnnnnnnnnnnnnnnnnnnnnnnnnnnnnnnnnnnnnnnnnnnnnnnnnnnnnnnnnnnnnnnnnnnnnnnnnnnnnnnnnnnnnnnnnnnnnnnnnnnnnnnnnnnnnnnnnnnnnnnnnnnnnnnnnnnnnnnnnnnnnnnnnnnnnnnnnnnnnnnnnnnnnnnnnnnnnnnnnnnnnnnnnnnnnnnnnnnnnnnnnnnnnnnnnnnnnnnnnnnnnnnnnnnnnnnnnnnnnnnnnnnnnnnnnnnnnnnnnnnnnnnnnnnnnnnnnnnnnnnnnnnnnnnnnnnnnnnnnnnnnnnnnnnnnnnnnnnnnnnnnnnnnnnnnnnnnnnnnnnnnnnnnnnnnnnnnnnnnnnnnnnnnnnnnnnnnnnnnnnnnnnnnnnnnnnnnnnnnnnnnnnnnnnnnnnnnnnnnnnnnnnnnnnnnnnnnnnnnnnnnnnnnnnnnnnnnnnnnnnnnnnnnnnnnnnnnnnnnnnnnnnnnnnnnnnnnnnnnnnnnnnnnnnnnnnnnnnnnnnnnnnnnnnnnnnnnnnnnnnnnnnnnnnnnnnnnnnnnnnnnnnnnnnnnnnnnnnnnnnnnnnnnnnnnnnnnnnnnnnnnnnnnnnnnnnnnnnnnnnnnnnnnnnnnnnnnnnnnnnnnnnnnnnnnnnnnnnnnnnnnnnnnnnnnnnnnnnnnnnnnnnnnnnnnnnnnnnnnnnnnnnnnnnnnnnnnnnnnnnnnnnnnnnnnnnnnnnnnnnnnnnnnnnnnnnnnnnnnnnnnnnnnnnnnnnnnnnnnnnnnnnnnnnnnnnnnnnnnnnnnnnnnnnnnnnnnnnnnnnnnnnnnnnnnnnnnnnnnnnnnnnnnnnnnnnnnnnnnnnnnnnnnnnnnnnnnnnnnnnnnnnnnnnnnnnnnnnnnnnnnnnnnnnnnnnnnnnnnnnnnnnnnnnnnnnnnnnnnnnnnnnnnnnnnnnnnnnnnnnnnnnnnnnnnnnnnnnnnnnnnnnnnnnnnnnnnnnnnnnnnnnnnnnnnnnnnnnnnnnnnnnnnnnnnnnnnnnnnnnnnnnnnnnnnnnnnnnnnnnnnnnnnnnnnnnnnnnnnnnnnnnnnnnnnnnnnnnnnnnnnnnnnnnnnnnnnnnnnnnnnnnnnnnnnnnnnnnnnnnnnnnnnnnnnnnnnnnnnnnnnnnnnnnnnnnnnnnnnnnnnnnnnnnnnnnnnnnnnnnnnnnnnnnnnnnnnnnnnnnnnnnnnnnnnnnnnnnnnnnnnnnnnnnnnnnnnnnnnnnnnnnnnnnnnnnnnnnnnnnnnnnnnnnnnnnnnnnnnnnnnnnnnnnnnnnnnnnnnnnnnnnnnnnnnnnnnnnnnnnnnnnnnnnnnnnnnnnnnnnnnnnnnnnnnnnnnnnnnnnnnnnnnnnnnnnnnnnnnnnnnnnnnnnnnnnnnnnnnnnnnnnnnnnnnnnnnnnnnnnnnnnnnnnnnnnnnnnnnnnnnnnnnnnnnnnnnnnnnnnnnnnnnnnnnnnnnnnnnnnnnnnnnnnnnnnnnnnnnnnnnnnnnnnnnnnnnnnnnnnnnnnnnnnnnnnnnnnnnnnnnnnnnnnnnnnnnnnnnnnnnnnnnnnnnnnnnnnnnnnnnnnnnnnnnnnnnnnnnnnnnnnnnnnnnnnnnnnnnnnnnnnnnnnnnnnnnnnnnnnnnnnnnnnnnnnnnnnnnnnnnnnnnnnnnnnnnnnnnnnnnnnnnnnnnnnnnnnnnnnnnnnnnnnnnnnnnnnnnnnnnnnnnnnnnnnnnnnnnnnnnnnnnnnnnnnnnnnnnnnnnnnnnnnnnnnnnnnnnnnnnnnnnnnnnnnnnnnnnnnnnnnnnnnnnnnnnnnnnnnnnnnnnnnnnnnnnnnnnnnnnnnnnnnnnnnnnnnnnnnnnnnnnnnnnnnnnnnnnnnnnnnnnnnnnnnnnnnnnnnnnnnnnnnnnnnnnnnnnnnnnnnnnnnnnnnnnnnnnnnnnnnnnnnnnnnnnnnnnnnnnnnnnnnnnnnnnnnnnnnnnnnnnnnnnnnnnnnnnnnnnnnnnnnnnnnnnnnnnnnnnnnnnnnnnnnnnnnnnnnnnnnnnnnnnnnnnnnnnnnnnnnnnnnnnnnnnnnnnnnnnnnnnnnnnnnnnnnnnnnnnnnnnnnnnnnnnnnnnnnnnnnnnnnnnnnnnnnnnnnnnnnnnnnnnnnnnnnnnnnnnnnnnnnnnnnnnnnnnnnnnnnnnnnnnnnnnnnnnnnnnnnnnnnnnnnnnnnnnnnnnnnnnnnnnnnnnnnnnnnnnnnnnnnnnnnnnnnnnnnnnnnnnnnnnnnnnnnnnnnnnnnnnnnnnnnnnnnnnnnnnnnnnnnnnnnnnnnnnnnnnnnnnnnnnnnnnnnnnnnnnnnnnnnnnnnnnnnnnnnnnnnnnnnnnnnnnnnnnnnnnnnnnnnnnnnnnnnnnnnnnnnnnnnnnnnnnnnnnnnnnnnnnnnnnnnnnnnnnnnnnnnnnnnnnnnnnnnnnnnnnnnnnnnnnnnnnnnnnnnnnnnnnnnnnnnnnnnnnnnnnnnnnnnnnnnnnnnnnnnnnnnnnnnnnnnnnnnnnnnnnnnnnnnnnnnnnnnnnnnnnnnnnnnnnnnnnnnnnnnnnnnnnnnnnnnnnnnnnnnnnnnnnnnnnnnnnnnnnnnnnnnnnnnnnnnnnnnnnnnnnnnnnnnnnnnnnnnnnn

SEQ ID NO: 10 - RNA, 1289 nt, Homo sapiens
  source 1..1289: mol_type = mRNA
ttctgccaccatgggagagaaagtgtcatggagagtgcaaggggtcgccgggggtcagaggtcccagggtctggggcagcttacatcatccatctgcctgtttattcattaattcattcatctactcttttatccatccacacacccacccatctaactaccccaaatttcacccatccactcttccaacctttcagtaattcaaccacacatccatccatccatccattcatccatcccatacattgatccgcaacttaatccacctacccaatcattcattctttcatacaaccaaccatccatccacccatcaatttatccaaccatccatttttcgtctgtccaccagccactcacaaccatccatctaaatattcagaaattatgaacccaattatcaatacttgcaatagttcaaccacacatccttccattcatccacccacccattcatccatttgtccatctgcctatcatccatccatccatccatccatctacctatctacccatctgactatcaacaaattcacctatctactcaatcttccttctaataactcaaccacacttccatccatcccatccaatacaacttaatctgctcatccaacatttcatctatccacccagtcaatcatctatccagcaatctatctatccactcatcaagttatccatccatcattcatctatactcatccatcatctaacaattacccccaaattcacccatccatacatctatactttcaatagttcaatcatatatccatccatctgtccatccatccatcatccatctagccacgaatctacccaccaactcatccatctatccatccatgtactcacccatctctccatccatccttttatctactcatcactcattcatctgttcaatcattcattcattcaccagcatttattcaacaaactagttcctggggataagagttctttccaggaaacccaggcagctggaagagacatacccagacacaaacggcccaatcctgagtggttagggctggaatagaaggaagaacctgatgatgagtagtgagagtcaacctggaggccaaggtgggcttcccagaggaggtgaccctgaatctggactttgatggatagggaggagttttccaggtaaagggaatggcatggcgggcagtctcagagggccaggagagtgtggatggtgtggccagaaagaggaagagctgggcaggcaggaatggtgagtggaagtggcatgggaggggccgagcaatgaccctcac

SEQ ID NO: 11 - RNA, 178 nt, Homo sapiens
  source 1..178: mol_type = mRNA
ccatctctccatccatccttttatctactcatcactcattcatctgttcaatcattcattcattcaccagcatttattcaacaaactagttcctggggataagagttctttccaggaaacccaggcagctggaagagacatacccagacacaaacggcccaatcctgagtggttaggg

SEQ ID NO: 12 - RNA, 128 nt, Homo sapiens
  source 1..128: mol_type = mRNA
ccatctctccatccatccttttatctactcatcactcattcatctgttcaatcattcattcattcaccagcatttattcaacaaactagttcctggggataagagttctttccaggaaacccaggcag

SEQ ID NO: 13 - DNA, 18 bp, synthetic construct
  source 1..18: mol_type = other DNA
agtggcatgggaggggcc

SEQ ID NO: 14 - DNA, 18 bp, synthetic construct
  source 1..18: mol_type = other DNA
ggaatggtgagtggaagt

SEQ ID NO: 15 - DNA, 18 bp, synthetic construct
  source 1..18: mol_type = other DNA
gaggaagagctgggcagg

SEQ ID NO: 16 - DNA, 18 bp, synthetic construct
  source 1..18: mol_type = other DNA
ggatggtgtggccagaaa

SEQ ID NO: 17 - DNA, 18 bp, synthetic construct
  source 1..18: mol_type = other DNA
gggccaggagagtgtgga

SEQ ID NO: 18 - DNA, 18 bp, synthetic construct
  source 1..18: mol_type = other DNA
gcgggcagtctcagaggg

SEQ ID NO: 19 - DNA, 18 bp, synthetic construct
  source 1..18: mol_type = other DNA
aagggaatggcatggcgg

SEQ ID NO: 20 - DNA, 18 bp, synthetic construct
  source 1..18: mol_type = other DNA
gggaggagttttccaggt

SEQ ID NO: 21 - DNA, 18 bp, synthetic construct
  source 1..18: mol_type = other DNA
ggactttgatggataggg

SEQ ID NO: 22 - DNA, 18 bp, synthetic construct
  source 1..18: mol_type = other DNA
ggaggtgaccctgaatct

SEQ ID NO: 23 - DNA, 18 bp, synthetic construct
  source 1..18: mol_type = other DNA
aggtgggcttcccagagg

SEQ ID NO: 24 - DNA, 18 bp, synthetic construct
  source 1..18: mol_type = other DNA
agtcaacctggaggccaa

SEQ ID NO: 25 - DNA, 18 bp, synthetic construct
  source 1..18: mol_type = other DNA
gagtagtgagagtcaacc

SEQ ID NO: 26 - DNA, 18 bp, synthetic construct
  source 1..18: mol_type = other DNA
gaacctgatgatgagtag

SEQ ID NO: 27 - DNA, 18 bp, synthetic construct
  source 1..18: mol_type = other DNA
gggctggaatagaaggaa

SEQ ID NO: 28 - DNA, 18 bp, synthetic construct
  source 1..18: mol_type = other DNA
ccaatcctgagtggttag

SEQ ID NO: 29 - DNA, 18 bp, synthetic construct
  source 1..18: mol_type = other DNA
cccagacacaaacggccc

SEQ ID NO: 30 - DNA, 18 bp, synthetic construct
  source 1..18: mol_type = other DNA
ggcagctggaagagacat

SEQ ID NO: 31 - DNA, 18 bp, synthetic construct
  source 1..18: mol_type = other DNA
gttctttccaggaaaccc

SEQ ID NO: 32 - DNA, 18 bp, synthetic construct
  source 1..18: mol_type = other DNA
gttcctggggataagagt

SEQ ID NO: 33 - DNA, 18 bp, synthetic construct
  source 1..18: mol_type = other DNA
tattcaacaaactagttc

SEQ ID NO: 34 - DNA, 18 bp, synthetic construct
  source 1..18: mol_type = other DNA
tcattcattcaccagcat

SEQ ID NO: 35 - DNA, 18 bp, synthetic construct
  source 1..18: mol_type = other DNA
catctgttcaatcattca

SEQ ID NO: 36 - DNA, 18 bp, synthetic construct
  source 1..18: mol_type = other DNA
ctactcatcactcattca

SEQ ID NO: 37 - DNA, 18 bp, synthetic construct
  source 1..18: mol_type = other DNA
tctccatccatcctttta

SEQ ID NO: 38 - DNA, 18 bp, synthetic construct
  source 1..18: mol_type = other DNA
atgtactcacccatctct

SEQ ID NO: 39 - DNA, 18 bp, synthetic construct
  source 1..18: mol_type = other DNA
tccatctatccatccatg

SEQ ID NO: 40 - DNA, 18 bp, synthetic construct
  source 1..18: mol_type = other DNA
tctacccaccaactcatc

SEQ ID NO: 41 - DNA, 18 bp, synthetic construct
  source 1..18: mol_type = other DNA
ccatctagccacgaatct

SEQ ID NO: 42 - DNA, 18 bp, synthetic construct
  source 1..18: mol_type = other DNA
ctgtccatccatccatca

SEQ ID NO: 43 - DNA, 18 bp, synthetic construct
  source 1..18: mol_type = other DNA
tcatatatccatccatct

SEQ ID NO: 44 - DNA, 18 bp, synthetic construct
  source 1..18: mol_type = other DNA
ctttcaatagttcaatca

SEQ ID NO: 45 - DNA, 18 bp, synthetic construct
  source 1..18: mol_type = other DNA
ccatccatacatctatac

SEQ ID NO: 46 - DNA, 18 bp, synthetic construct
  source 1..18: mol_type = other DNA
attacccccaaattcacc

SEQ ID NO: 47 - DNA, 18 bp, synthetic construct
  source 1..18: mol_type = other DNA
atccatcatctaacaatt

SEQ ID NO: 48 - DNA, 18 bp, synthetic construct
  source 1..18: mol_type = other DNA
cattcatctatactcatc

SEQ ID NO: 49 - DNA, 18 bp, synthetic construct
  source 1..18: mol_type = other DNA
agttatccatccatcatt

SEQ ID NO: 50 - DNA, 18 bp, synthetic construct
  source 1..18: mol_type = other DNA
ccactcatcaagttatcc

SEQ ID NO: 51 - DNA, 18 bp, synthetic construct
  source 1..18: mol_type = other DNA
atccagcaatctatctat

SEQ ID NO: 52 - DNA, 18 bp, synthetic construct
  source 1..18: mol_type = other DNA
atccacccagtcaatcat

SEQ ID NO: 53 - DNA, 18 bp, synthetic construct
  source 1..18: mol_type = other DNA
gctcatccaacatttcat

SEQ ID NO: 54 - DNA, 18 bp, synthetic construct
  source 1..18: mol_type = other DNA
ccaatacaacttaatctg

SEQ ID NO: 55 - DNA, 18 bp, synthetic construct
  source 1..18: mol_type = other DNA
acacttccatccatccca

SEQ ID NO: 56 - DNA, 18 bp, synthetic construct
  source 1..18: mol_type = other DNA
ttccttctaataactcaa

SEQ ID NO: 57 - DNA, 18 bp, synthetic construct
  source 1..18: mol_type = other DNA
cacctatctactcaatct

SEQ ID NO: 58 - DNA, 18 bp, synthetic construct
  source 1..18: mol_type = other DNA
catctgactatcaacaaa

SEQ ID NO: 59 - DNA, 18 bp, synthetic construct
  source 1..18: mol_type = other DNA
ccatctacctatctaccc

SEQ ID NO: 60 - DNA, 18 bp, synthetic construct
  source 1..18: mol_type = other DNA
ccatccatccatccatcc

SEQ ID NO: 61 - DNA, 18 bp, synthetic construct
  source 1..18: mol_type = other DNA
gtccatctgcctatacat

SEQ ID NO: 62 - DNA, 18 bp, synthetic construct
  source 1..18: mol_type = other DNA
acccacccattcatccat

SEQ ID NO: 63 - DNA, 18 bp, synthetic construct
  source 1..18: mol_type = other DNA
acacatccttccattcat

SEQ ID NO: 64 - DNA, 18 bp, synthetic construct
  source 1..18: mol_type = other DNA
cttgcaatagttcaacca

SEQ ID NO: 65 - DNA, 18 bp, synthetic construct
  source 1..18: mol_type = other DNA
cccaattatcaatacttg

SEQ ID NO: 66 - DNA, 18 bp, synthetic construct
  source 1..18: mol_type = other DNA
tcagaaattatgaaccca

SEQ ID NO: 67 - DNA, 18 bp, synthetic construct
  source 1..18: mol_type = other DNA
ccatccatctaaatattc

SEQ ID NO: 68 - DNA, 18 bp, synthetic construct
  source 1..18: mol_type = other DNA
tgtccaccagccactcac

SEQ ID NO: 69 - DNA, 18 bp, synthetic construct
  source 1..18: mol_type = other DNA
ccaaccatccatttttcg

SEQ ID NO: 70 - DNA, 18 bp, synthetic construct
  source 1..18: mol_type = other DNA
ccatccacccatcaattt

SEQ ID NO: 71 - DNA, 18 bp, synthetic construct
  source 1..18: mol_type = other DNA
ctttcatacaaccaacca

SEQ ID NO: 72 - DNA, 18 bp, synthetic construct
  source 1..18: mol_type = other DNA
acctacccaatcattcat

SEQ ID NO: 73 - DNA, 18 bp, synthetic construct
  source 1..18: mol_type = other DNA
tgatccgcaacttaatcc

SEQ ID NO: 74 - DNA, 18 bp, synthetic construct
  source 1..18: mol_type = other DNA
attcatccatcccataca

SEQ ID NO: 75 - DNA, 18 bp, synthetic construct
  source 1..18: mol_type = other DNA
acacatccatccatccat

SEQ ID NO: 76 - DNA, 18 bp, synthetic construct
  source 1..18: mol_type = other DNA
acctttcagtaattcaac

SEQ ID NO: 77 - DNA, 18 bp, synthetic construct
  source 1..18: mol_type = other DNA
ttcacccatccactcttc

SEQ ID NO: 78 - DNA, 18 bp, synthetic construct
  source 1..18: mol_type = other DNA
cccatctaactaccccaa

SEQ ID NO: 79 - DNA, 18 bp, synthetic construct
  source 1..18: mol_type = other DNA
tttatccatccacacacc

SEQ ID NO: 80 - DNA, 18 bp, synthetic construct
  source 1..18: mol_type = other DNA
attcattcatctactctt

SEQ ID NO: 81 - DNA, 18 bp, synthetic construct
  source 1..18: mol_type = other DNA
atctgcctgtttattcat

SEQ ID NO: 82 - DNA, 18 bp, synthetic construct
  source 1..18: mol_type = other DNA
gcagcttacatcatccat

SEQ ID NO: 83 - DNA, 18 bp, synthetic construct
  source 1..18: mol_type = other DNA
ccagggtctggggcagct

SEQ ID NO: 84 - DNA, 18 bp, synthetic construct
  source 1..18: mol_type = other DNA
gtcgccgggggtcagagg

SEQ ID NO: 85 - DNA, 18 bp, synthetic construct
  source 1..18: mol_type = other DNA
tgtcatggagagtgcaag

SEQ ID NO: 86 - DNA, 18 bp, synthetic construct
  source 1..18: mol_type = other DNA
tgccaccatgggagagaa

SEQ ID NO: 87 - DNA, 18 bp, synthetic construct
  source 1..18: mol_type = other DNA
ccgagcaatgaccctcac

SEQ ID NO: 88 - DNA, 18 bp, synthetic construct
  source 1..18: mol_type = other DNA
gccgagcaatgaccctca

SEQ ID NO: 89 - DNA, 18 bp, synthetic construct
  source 1..18: mol_type = other DNA
ggccgagcaatgaccctc

SEQ ID NO: 90 - DNA, 18 bp, synthetic construct
  source 1..18: mol_type = other DNA
gggccgagcaatgaccct

SEQ ID NO: 91 - DNA, 18 bp, synthetic construct
  source 1..18: mol_type = other DNA
ggggccgagcaatgaccc

SEQ ID NO: 92 - DNA, 18 bp, synthetic construct
  source 1..18: mol_type = other DNA
aggggccgagcaatgacc

SEQ ID NO: 93 - DNA, 18 bp, synthetic construct
  source 1..18: mol_type = other DNA
gaggggccgagcaatgac

SEQ ID NO: 94 - DNA, 18 bp, synthetic construct
  source 1..18: mol_type = other DNA
ggaggggccgagcaatga

SEQ ID NO: 95 - DNA, 18 bp, synthetic construct
  source 1..18: mol_type = other DNA
gggaggggccgagcaatg

SEQ ID NO: 96 - DNA, 18 bp, synthetic construct
  source 1..18: mol_type = other DNA
tgggaggggccgagcaat

SEQ ID NO: 97 - DNA, 18 bp, synthetic construct
  source 1..18: mol_type = other DNA
atgggaggggccgagcaa

SEQ ID NO: 98 - DNA, 18 bp, synthetic construct
  source 1..18: mol_type = other DNA
catgggaggggccgagca

SEQ ID NO: 99 - DNA, 18 bp, synthetic construct
  source 1..18: mol_type = other DNA
gcatgggaggggccgagc

SEQ ID NO: 100 - DNA, 18 bp, synthetic construct
  source 1..18: mol_type = other DNA
ggcatgggaggggccgag

SEQ ID NO: 101 - DNA, 18 bp, synthetic construct
  source 1..18: mol_type = other DNA
tggcatgggaggggccga

SEQ ID NO: 102 - DNA, 18 bp, synthetic construct
  source 1..18: mol_type = other DNA
gtggcatgggaggggccg

SEQ ID NO: 103 - DNA, 18 bp, synthetic construct
  source 1..18: mol_type = other DNA
aagtggcatgggaggggc

SEQ ID NO: 104 - DNA, 18 bp, synthetic construct
  source 1..18: mol_type = other DNA
gaagtggcatgggagggg

SEQ ID NO: 105 - DNA, 18 bp, synthetic construct
  source 1..18: mol_type = other DNA
ggaagtggcatgggaggg

SEQ ID NO: 106 - DNA, 18 bp, synthetic construct
  source 1..18: mol_type = other DNA
tggaagtggcatgggagg

SEQ ID NO: 107 - DNA, 18 bp, synthetic construct
  source 1..18: mol_type = other DNA
gtggaagtggcatgggag

SEQ ID NO: 108 - DNA, 18 bp, synthetic construct
  source 1..18: mol_type = other DNA
agtggaagtggcatggga

SEQ ID NO: 109 - DNA, 18 bp, synthetic construct
  source 1..18: mol_type = other DNA
gagtggaagtggcatggg

SEQ ID NO: 110 - DNA, 18 bp, synthetic construct
  source 1..18: mol_type = other DNA
tgagtggaagtggcatgg

SEQ ID NO: 111 - DNA, 18 bp, synthetic construct
  source 1..18: mol_type = other DNA
gtgagtggaagtggcatg

SEQ ID NO: 112 - DNA, 18 bp, synthetic construct
  source 1..18: mol_type = other DNA
ggtgagtggaagtggcat

SEQ ID NO: 113 - DNA, 18 bp, synthetic construct
  source 1..18: mol_type = other DNA
tggtgagtggaagtggca

SEQ ID NO: 114 - DNA, 18 bp, synthetic construct
  source 1..18: mol_type = other DNA
atggtgagtggaagtggc

SEQ ID NO: 115 - DNA, 18 bp, synthetic construct
  source 1..18: mol_type = other DNA
aatggtgagtggaagtgg

SEQ ID NO: 116 - DNA, 18 bp, synthetic construct
  source 1..18: mol_type = other DNA
gaatggtgagtggaagtg

SEQ ID NO: 117 - DNA, 18 bp, synthetic construct
  source 1..18: mol_type = other DNA
aggaatggtgagtggaag

SEQ ID NO: 118 - DNA, 18 bp, synthetic construct
  source 1..18: mol_type = other DNA
caggaatggtgagtggaa

SEQ ID NO: 119 - DNA, 18 bp, synthetic construct
  source 1..18: mol_type = other DNA
gcaggaatggtgagtgga

SEQ ID NO: 120 - DNA, 18 bp, synthetic construct
  source 1..18: mol_type = other DNA
ggcaggaatggtgagtgg

SEQ ID NO: 121 - DNA, 18 bp, synthetic construct
  source 1..18: mol_type = other DNA
aggcaggaatggtgagtg

SEQ ID NO: 122 - DNA, 18 bp, synthetic construct
  source 1..18: mol_type = other DNA
caggcaggaatggtgagt

SEQ ID NO: 123 - DNA, 18 bp, synthetic construct
  source 1..18: mol_type = other DNA
gcaggcaggaatggtgag

SEQ ID NO: 124 - DNA, 18 bp, synthetic construct
  source 1..18: mol_type = other DNA
ggcaggcaggaatggtga

SEQ ID NO: 125 - DNA, 18 bp, synthetic construct
  source 1..18: mol_type = other DNA
gggcaggcaggaatggtg

SEQ ID NO: 126 - DNA, 18 bp, synthetic construct
  source 1..18: mol_type = other DNA
tgggcaggcaggaatggt

SEQ ID NO: 127 - DNA, 18 bp, synthetic construct
  source 1..18: mol_type = other DNA
ctgggcaggcaggaatgg

SEQ ID NO: 128 - DNA, 18 bp, synthetic construct
  source 1..18: mol_type = other DNA
gctgggcaggcaggaatg

SEQ ID NO: 129 - DNA, 18 bp, synthetic construct
  source 1..18: mol_type = other DNA
agctgggcaggcaggaat

SEQ ID NO: 130 - DNA, 18 bp, synthetic construct
  source 1..18: mol_type = other DNA
gagctgggcaggcaggaa

SEQ ID NO: 131 - DNA, 18 bp, synthetic construct
  source 1..18: mol_type = other DNA
agagctgggcaggcagga

SEQ ID NO: 132 - DNA, 18 bp, synthetic construct
  source 1..18: mol_type = other DNA
aagagctgggcaggcagg

SEQ ID NO: 133 - DNA, 18 bp, synthetic construct
  source 1..18: mol_type = other DNA
gaagagctgggcaggcag

SEQ ID NO: 134 - DNA, 18 bp, synthetic construct
  source 1..18: mol_type = other DNA
ggaagagctgggcaggca

SEQ ID NO: 135 - DNA, 18 bp, synthetic construct
  source 1..18: mol_type = other DNA
aggaagagctgggcaggc

SEQ ID NO: 136 - DNA, 18 bp, synthetic construct
  source 1..18: mol_type = other DNA
agaggaagagctgggcag

SEQ ID NO: 137 - DNA, 18 bp, synthetic construct
  source 1..18: mol_type = other DNA
aagaggaagagctgggca

SEQ ID NO: 138 - DNA, 18 bp, synthetic construct
  source 1..18: mol_type = other DNA
aaagaggaagagctgggc

SEQ ID NO: 139 - DNA, 18 bp, synthetic construct
  source 1..18: mol_type = other DNA
gaaagaggaagagctggg

SEQ ID NO: 140 - DNA, 18 bp, synthetic construct
  source 1..18: mol_type = other DNA
agaaagaggaagagctgg

SEQ ID NO: 141 - DNA, 18 bp, synthetic construct
  source 1..18: mol_type = other DNA
cagaaagaggaagagctg

SEQ ID NO: 142 - DNA, 18 bp, synthetic construct
  source 1..18: mol_type = other DNA
ccagaaagaggaagagct

SEQ ID NO: 143 - DNA, 18 bp, synthetic construct
  source 1..18: mol_type = other DNA
gccagaaagaggaagagc

SEQ ID NO: 144 - DNA, 18 bp, synthetic construct
  source 1..18: mol_type = other DNA
ggccagaaagaggaagag

SEQ ID NO: 145 - DNA, 18 bp, synthetic construct
  source 1..18: mol_type = other DNA
tggccagaaagaggaaga

SEQ ID NO: 146 - DNA, 18 bp, synthetic construct
  source 1..18: mol_type = other DNA
gtggccagaaagaggaag

SEQ ID NO: 147 - DNA, 18 bp, synthetic construct
  source 1..18: mol_type = other DNA
tgtggccagaaagaggaa

SEQ ID NO: 148 - DNA, 18 bp, synthetic construct
  source 1..18: mol_type = other DNA
gtgtggccagaaagagga

SEQ ID NO: 149 - DNA, 18 bp, synthetic construct
  source 1..18: mol_type = other DNA
ggtgtggccagaaagagg

SEQ ID NO: 150 - DNA, 18 bp, synthetic construct
  source 1..18: mol_type = other DNA
tggtgtggccagaaagag

SEQ ID NO: 151 - DNA, 18 bp, synthetic construct
  source 1..18: mol_type = other DNA
atggtgtggccagaaaga

SEQ ID NO: 152 - DNA, 18 bp, synthetic construct
  source 1..18: mol_type = other DNA
gatggtgtggccagaaag

SEQ ID NO: 153 - DNA, 18 bp, synthetic construct
  source 1..18: mol_type = other DNA
tggatggtgtggccagaa

SEQ ID NO: 154 - DNA, 18 bp, synthetic construct
  source 1..18: mol_type = other DNA
gtggatggtgtggccaga

SEQ ID NO: 155 - DNA, 18 bp, synthetic construct
  source 1..18: mol_type = other DNA
tgtggatggtgtggccag

SEQ ID NO: 156 - DNA, 18 bp, synthetic construct
  source 1..18: mol_type = other DNA
gtgtggatggtgtggcca

SEQ ID NO: 157 - DNA, 18 bp, synthetic construct
  source 1..18: mol_type = other DNA
agtgtggatggtgtggcc

SEQ ID NO: 158 - DNA, 18 bp, synthetic construct
  source 1..18: mol_type = other DNA
gagtgtggatggtgtggc

SEQ ID NO: 159 - DNA, 18 bp, synthetic construct
  source 1..18: mol_type = other DNA
agagtgtggatggtgtgg

SEQ ID NO: 160 - DNA, 18 bp, synthetic construct
  source 1..18: mol_type = other DNA
gagagtgtggatggtgtg

SEQ ID NO: 161 - DNA, 18 bp, synthetic construct
  source 1..18: mol_type = other DNA
ggagagtgtggatggtgt

SEQ ID NO: 162 - DNA, 18 bp, synthetic construct
  source 1..18: mol_type = other DNA
aggagagtgtggatggtg

SEQ ID NO: 163 - DNA, 18 bp, synthetic construct
  source 1..18: mol_type = other DNA
caggagagtgtggatggt

SEQ ID NO: 164 - DNA, 18 bp, synthetic construct
  source 1..18: mol_type = other DNA
ccaggagagtgtggatgg

SEQ ID NO: 165 - DNA, 18 bp, synthetic construct
  source 1..18: mol_type = other DNA
gccaggagagtgtggatg

SEQ ID NO: 166 - DNA, 18 bp, synthetic construct
  source 1..18: mol_type = other DNA
ggccaggagagtgtggat

SEQ ID NO: 167 - DNA, 18 bp, synthetic construct
  source 1..18: mol_type = other DNA
agggccaggagagtgtgg

SEQ ID NO: 168 - DNA, 18 bp, synthetic construct
  source 1..18: mol_type = other DNA
gagggccaggagagtgtg

SEQ ID NO: 169 - DNA, 18 bp, synthetic construct
  source 1..18: mol_type = other DNA
agagggccaggagagtgt

SEQ ID NO: 170 - DNA, 18 bp, synthetic construct
  source 1..18: mol_type = other DNA
cagagggccaggagagtg

SEQ ID NO: 171 - DNA, 18 bp, synthetic construct
  source 1..18: mol_type = other DNA
tcagagggccaggagagt

SEQ ID NO: 172 - DNA, 18 bp, synthetic construct
  source 1..18: mol_type = other DNA
ctcagagggccaggagag

SEQ ID NO: 173 - DNA, 18 bp, synthetic construct
  source 1..18: mol_type = other DNA
tctcagagggccaggaga

SEQ ID NO: 174 - DNA, 18 bp, synthetic construct
  source 1..18: mol_type = other DNA
gtctcagagggccaggag

SEQ ID NO: 175 - DNA, 18 bp, synthetic construct
  source 1..18: mol_type = other DNA
agtctcagagggccagga

SEQ ID NO: 176 - DNA, 18 bp, synthetic construct
  source 1..18: mol_type = other DNA
cagtctcagagggccagg

SEQ ID NO: 177 - DNA, 18 bp, synthetic construct
  source 1..18: mol_type = other DNA
gcagtctcagagggccag

SEQ ID NO: 178 - DNA, 18 bp, synthetic construct
  source 1..18: mol_type = other DNA
ggcagtctcagagggcca

SEQ ID NO: 179 - DNA, 18 bp, synthetic construct
  source 1..18: mol_type = other DNA
gggcagtctcagagggcc

SEQ ID NO: 180 - DNA, 18 bp, synthetic construct
  source 1..18: mol_type = other DNA
cgggcagtctcagagggc

SEQ ID NO: 181 - DNA, 18 bp, synthetic construct
  source 1..18: mol_type = other DNA
ggcgggcagtctcagagg

SEQ ID NO: 182 - DNA, 18 bp, synthetic construct
  source 1..18: mol_type = other DNA
tggcgggcagtctcagag

SEQ ID NO: 183 - DNA, 18 bp, synthetic construct
  source 1..18: mol_type = other DNA
atggcgggcagtctcaga

SEQ ID NO: 184 - DNA, 18 bp, synthetic construct
  source 1..18: mol_type = other DNA
catggcgggcagtctcag

SEQ ID NO: 185 - DNA, 18 bp, synthetic construct
  source 1..18: mol_type = other DNA
gcatggcgggcagtctca

SEQ ID NO: 186 - DNA, 18 bp, synthetic construct
  source 1..18: mol_type = other DNA
ggcatggcgggcagtctc

SEQ ID NO: 187 - DNA, 18 bp, synthetic construct
  source 1..18: mol_type = other DNA
tggcatggcgggcagtct

SEQ ID NO: 188 - DNA, 18 bp, synthetic construct
  source 1..18: mol_type = other DNA
atggcatggcgggcagtc

SEQ ID NO: 189 - DNA, 18 bp, synthetic construct
  source 1..18: mol_type = other DNA
aatggcatggcgggcagt

SEQ ID NO: 190 - DNA, 18 bp, synthetic construct
  source 1..18: mol_type = other DNA
gaatggcatggcgggcag

SEQ ID NO: 191 - DNA, 18 bp, synthetic construct
  source 1..18: mol_type = other DNA
ggaatggcatggcgggca

SEQ ID NO: 192 - DNA, 18 bp, synthetic construct
  source 1..18: mol_type = other DNA
gggaatggcatggcgggc

SEQ ID NO: 193 - DNA, 18 bp, synthetic construct
  source 1..18: mol_type = other DNA
agggaatggcatggcggg

SEQ ID NO: 194 - DNA, 18 bp, synthetic construct
  source 1..18: mol_type = other DNA
aaagggaatggcatggcg

SEQ ID NO: 195 - DNA, 18 bp, synthetic construct
  source 1..18: mol_type = other DNA
taaagggaatggcatggc

SEQ ID NO: 196 - DNA, 18 bp, synthetic construct
  source 1..18: mol_type = other DNA
gtaaagggaatggcatgg

SEQ ID NO: 197 - DNA, 18 bp, synthetic construct
  source 1..18: mol_type = other DNA
ggtaaagggaatggcatg

SEQ ID NO: 198 - DNA, 18 bp, synthetic construct
  source 1..18: mol_type = other DNA
aggtaaagggaatggcat

SEQ ID NO: 199 - DNA, 18 bp, synthetic construct
  source 1..18: mol_type = other DNA
caggtaaagggaatggca

SEQ ID NO: 200 - DNA, 18 bp, synthetic construct
  source 1..18: mol_type = other DNA
ccaggtaaagggaatggc

SEQ ID NO: 201 - DNA, 18 bp, synthetic construct
  source 1..18: mol_type = other DNA
tccaggtaaagggaatgg

SEQ ID NO: 202 - DNA, 18 bp, synthetic construct
  source 1..18: mol_type = other DNA
ttccaggtaaagggaatg

SEQ ID NO: 203 - DNA, 18 bp, synthetic construct
  source 1..18: mol_type = other DNA
tttccaggtaaagggaat

SEQ ID NO: 204 - DNA, 18 bp, synthetic construct
  source 1..18: mol_type = other DNA
ttttccaggtaaagggaa

SEQ ID NO: 205 - DNA, 18 bp, synthetic construct
  source 1..18: mol_type = other DNA
gttttccaggtaaaggga

SEQ ID NO: 206 - DNA, 18 bp, synthetic construct
  source 1..18: mol_type = other DNA
agttttccaggtaaaggg

SEQ ID NO: 207 - DNA, 18 bp, synthetic construct
  source 1..18: mol_type = other DNA
gagttttccaggtaaagg

SEQ ID NO: 208 - DNA, 18 bp, synthetic construct
  source 1..18: mol_type = other DNA
ggagttttccaggtaaag

SEQ ID NO: 209 - DNA, 18 bp, synthetic construct
  source 1..18: mol_type = other DNA
aggagttttccaggtaaa

SEQ ID NO: 210 - DNA, 18 bp, synthetic construct
  source 1..18: mol_type = other DNA
gaggagttttccaggtaa

SEQ ID NO: 211 - DNA, 18 bp, synthetic construct
  source 1..18: mol_type = other DNA
ggaggagttttccaggta

SEQ ID NO: 212 - DNA, 18 bp, synthetic construct
  source 1..18: mol_type = other DNA
agggaggagttttccagg

SEQ ID NO: 213 - DNA, 18 bp, synthetic construct
  source 1..18: mol_type = other DNA
tagggaggagttttccag

SEQ ID NO: 214 - DNA, 18 bp, synthetic construct
  source 1..18: mol_type = other DNA
atagggaggagttttcca

SEQ ID NO: 215 - DNA, 18 bp, synthetic construct
  source 1..18: mol_type = other DNA
gatagggaggagttttcc

SEQ ID NO: 216 - DNA, 18 bp, synthetic construct
  source 1..18: mol_type = other DNA
ggatagggaggagttttc

SEQ ID NO: 217 - DNA, 18 bp, synthetic construct
  source 1..18: mol_type = other DNA
tggatagggaggagtttt

SEQ ID NO: 218 - DNA, 18 bp, synthetic construct
  source 1..18: mol_type = other DNA
atggatagggaggagttt

SEQ ID NO: 219 - DNA, 18 bp, synthetic construct
  source 1..18: mol_type = other DNA
gatggatagggaggagtt

SEQ ID NO: 220 - DNA, 18 bp, synthetic construct
  source 1..18: mol_type = other DNA
tgatggatagggaggagt

SEQ ID NO: 221 - DNA, 18 bp, synthetic construct
  source 1..18: mol_type = other DNA
ttgatggatagggaggag

SEQ ID NO: 222 - DNA, 18 bp, synthetic construct
  source 1..18: mol_type = other DNA
tttgatggatagggagga

SEQ ID NO: 223 - DNA, 18 bp, synthetic construct
  source 1..18: mol_type = other DNA
ctttgatggatagggagg

SEQ ID NO: 224 - DNA, 18 bp, synthetic construct
  source 1..18: mol_type = other DNA
actttgatggatagggag

SEQ ID NO: 225 - DNA, 18 bp, synthetic construct
  source 1..18: mol_type = other DNA
gactttgatggataggga

SEQ ID NO: 226 - DNA, 18 bp, synthetic construct
  source 1..18: mol_type = other DNA
tggactttgatggatagg

SEQ ID NO: 227 - DNA, 18 bp, synthetic construct
  source 1..18: mol_type = other DNA
ctggactttgatggatag

SEQ ID NO: 228 - DNA, 18 bp, synthetic construct
  source 1..18: mol_type = other DNA
tctggactttgatggata

SEQ ID NO: 229 - DNA, 18 bp, synthetic construct
  source 1..18: mol_type = other DNA
atctggactttgatggat

SEQ ID NO: 230 - DNA, 18 bp, synthetic construct
  source 1..18: mol_type = other DNA
aatctggactttgatgga

SEQ ID NO: 231 - DNA, 18 bp, synthetic construct
  source 1..18: mol_type = other DNA
gaatctggactttgatgg

SEQ ID NO: 232 - DNA, 18 bp, synthetic construct
  source 1..18: mol_type = other DNA
tgaatctggactttgatg

SEQ ID NO: 233 - DNA, 18 bp, synthetic construct
  source 1..18: mol_type = other DNA
ctgaatctggactttgat

SEQ ID NO: 234 - DNA, 18 bp, synthetic construct
  source 1..18: mol_type = other DNA
cctgaatctggactttga

SEQ ID NO: 235 - DNA, 18 bp, synthetic construct
  source 1..18: mol_type = other DNA
ccctgaatctggactttg

SEQ ID NO: 236 - DNA, 18 bp, synthetic construct
  source 1..18: mol_type = other DNA
accctgaatctggacttt

SEQ ID NO: 237 - DNA, 18 bp, synthetic construct
  source 1..18: mol_type = other DNA
gaccctgaatctggactt

SEQ ID NO: 238 - DNA, 18 bp, synthetic construct
  source 1..18: mol_type = other DNA
tgaccctgaatctggact

SEQ ID NO: 239 - DNA, 18 bp, synthetic construct
  source 1..18: mol_type = other DNA
gtgaccctgaatctggac

SEQ ID NO: 240 - DNA, 18 bp, synthetic construct
  source 1..18: mol_type = other DNA
ggtgaccctgaatctgga

SEQ ID NO: 241 - DNA, 18 bp, synthetic construct
  source 1..18: mol_type = other DNA
aggtgaccctgaatctgg

SEQ ID NO: 242 - DNA, 18 bp, synthetic construct
  source 1..18: mol_type = other DNA
gaggtgaccctgaatctg

SEQ ID NO: 243 - DNA, 18 bp, synthetic construct
  source 1..18: mol_type = other DNA
aggaggtgaccctgaatc

SEQ ID NO: 244 - DNA, 18 bp, synthetic construct
  source 1..18: mol_type = other DNA
gaggaggtgaccctgaat

SEQ ID NO: 245 - DNA, 18 bp, synthetic construct
  source 1..18: mol_type = other DNA
agaggaggtgaccctgaa

SEQ ID NO: 246 - DNA, 18 bp, synthetic construct
  source 1..18: mol_type = other DNA
cagaggaggtgaccctga

SEQ ID NO: 247 - DNA, 18 bp, synthetic construct
  source 1..18: mol_type = other DNA
ccagaggaggtgaccctg

SEQ ID NO: 248 - DNA, 18 bp, synthetic construct
  source 1..18: mol_type = other DNA
cccagaggaggtgaccct

SEQ ID NO: 249 - DNA, 18 bp, synthetic construct
  source 1..18: mol_type = other DNA
tcccagaggaggtgaccc

SEQ ID NO: 250 - DNA, 18 bp, synthetic construct
  source 1..18: mol_type = other DNA
ttcccagaggaggtgacc

SEQ ID NO: 251 - DNA, 18 bp, synthetic construct
  source 1..18: mol_type = other DNA
cttcccagaggaggtgac

SEQ ID NO: 252 - DNA, 18 bp, synthetic construct
  source 1..18: mol_type = other DNA
gcttcccagaggaggtga

SEQ ID NO: 253 - DNA, 18 bp, synthetic construct
  source 1..18: mol_type = other DNA
ggcttcccagaggaggtg

SEQ ID NO: 254 - DNA, 18 bp, synthetic construct
  source 1..18: mol_type = other DNA
gggcttcccagaggaggt

SEQ ID NO: 255 - DNA, 18 bp, synthetic construct
  source 1..18: mol_type = other DNA
tgggcttcccagaggagg

SEQ ID NO: 256 - DNA, 18 bp, synthetic construct
  source 1..18: mol_type = other DNA
gtgggcttcccagaggag

SEQ ID NO: 257 - DNA, 18 bp, synthetic construct
  source 1..18: mol_type = other DNA
ggtgggcttcccagagga

SEQ ID NO: 258 - DNA, 18 bp, synthetic construct
  source 1..18: mol_type = other DNA
aaggtgggcttcccagag

SEQ ID NO: 259 - DNA, 18 bp, synthetic construct
  source 1..18: mol_type = other DNA
caaggtgggcttcccaga

SEQ ID NO: 260 - DNA, 18 bp, synthetic construct
  source 1..18: mol_type = other DNA
ccaaggtgggcttcccag

SEQ ID NO: 261 - DNA, 18 bp, synthetic construct
  source 1..18: mol_type = other DNA
gccaaggtgggcttccca

SEQ ID NO: 262 - DNA, 18 bp, synthetic construct
  source 1..18: mol_type = other DNA
ggccaaggtgggcttccc

SEQ ID NO: 263 - DNA, 18 bp, synthetic construct
  source 1..18: mol_type = other DNA
aggccaaggtgggcttcc

SEQ ID NO: 264 - DNA, 18 bp, synthetic construct
  source 1..18: mol_type = other DNA
gaggccaaggtgggcttc

SEQ ID NO: 265 - DNA, 18 bp, synthetic construct
  source 1..18: mol_type = other DNA
ggaggccaaggtgggctt

SEQ ID NO: 266 - DNA, 18 bp, synthetic construct
  source 1..18: mol_type = other DNA
tggaggccaaggtgggct

SEQ ID NO: 267 - DNA, 18 bp, synthetic construct
  source 1..18: mol_type = other DNA
ctggaggccaaggtgggc

SEQ ID NO: 268 - DNA, 18 bp, synthetic construct
  source 1..18: mol_type = other DNA
cctggaggccaaggtggg

SEQ ID NO: 269 - DNA, 18 bp, synthetic construct
  source 1..18: mol_type = other DNA
acctggaggccaaggtgg

SEQ ID NO: 270 - DNA, 18 bp, synthetic construct
  source 1..18: mol_type = other DNA
aacctggaggccaaggtg

SEQ ID NO: 271 - DNA, 18 bp, synthetic construct
  source 1..18: mol_type = other DNA
caacctggaggccaaggt

SEQ ID NO: 272 - DNA, 18 bp, synthetic construct
  source 1..18: mol_type = other DNA
tcaacctggaggccaagg

SEQ ID NO: 273 - DNA, 18 bp, synthetic construct
  source 1..18: mol_type = other DNA
gtcaacctggaggccaag

SEQ ID NO: 274 - DNA, 18 bp, synthetic construct
  source 1..18: mol_type = other DNA
gagtcaacctggaggcca

SEQ ID NO: 275 - DNA, 18 bp, synthetic construct
  source 1..18: mol_type = other DNA
agagtcaacctggaggcc

SEQ ID NO: 276 - DNA, 18 bp, synthetic construct
  source 1..18: mol_type = other DNA
gagagtcaacctggaggc

SEQ ID NO: 277 - DNA, 18 bp, synthetic construct
  source 1..18: mol_type = other DNA
tgagagtcaacctggagg

SEQ ID NO: 278 - DNA, 18 bp, synthetic construct
  source 1..18: mol_type = other DNA
gtgagagtcaacctggag

SEQ ID NO: 279 - DNA, 18 bp, synthetic construct
  source 1..18: mol_type = other DNA
agtgagagtcaacctgga

SEQ ID NO: 280 - DNA, 18 bp, synthetic construct
  source 1..18: mol_type = other DNA
tagtgagagtcaacctgg

SEQ ID NO: 281 - DNA, 18 bp, synthetic construct
  source 1..18: mol_type = other DNA
gtagtgagagtcaacctg

SEQ ID NO: 282 - DNA, 18 bp, synthetic construct
  source 1..18: mol_type = other DNA
agtagtgagagtcaacct

SEQ ID NO: 283 - DNA, 18 bp, synthetic construct
  source 1..18: mol_type = other DNA
tgagtagtgagagtcaac

SEQ ID NO: 284 - DNA, 18 bp, synthetic construct
  source 1..18: mol_type = other DNA
atgagtagtgagagtcaa

SEQ ID NO: 285 - DNA, 18 bp, synthetic construct
  source 1..18: mol_type = other DNA
gatgagtagtgagagtca

SEQ ID NO: 286 - DNA, 18 bp, synthetic construct
  source 1..18: mol_type = other DNA
tgatgagtagtgagagtc

SEQ ID NO: 287 - DNA, 18 bp, synthetic construct
  source 1..18: mol_type = other DNA
atgatgagtagtgagagt

SEQ ID NO: 288 - DNA, 18 bp, synthetic construct
  source 1..18: mol_type = other DNA
gatgatgagtagtgagag

SEQ ID NO: 289 - DNA, 18 bp, synthetic construct
  source 1..18: mol_type = other DNA
tgatgatgagtagtgaga

SEQ ID NO: 290 - DNA, 18 bp, synthetic construct
  source 1..18: mol_type = other DNA
ctgatgatgagtagtgag

SEQ ID NO: 291 - DNA, 18 bp, synthetic construct
  source 1..18: mol_type = other DNA
cctgatgatgagtagtga

SEQ ID NO: 292 - DNA, 18 bp, synthetic construct
  source 1..18: mol_type = other DNA
acctgatgatgagtagtg

SEQ ID NO: 293 - DNA, 18 bp, synthetic construct
  source 1..18: mol_type = other DNA
aacctgatgatgagtagt

SEQ ID NO: 294 - DNA, 18 bp, synthetic construct
  source 1..18: mol_type = other DNA
agaacctgatgatgagta

SEQ ID NO: 295 - DNA, 18 bp, synthetic construct
  source 1..18: mol_type = other DNA
aagaacctgatgatgagt

SEQ ID NO: 296 - DNA, 18 bp, synthetic construct
  source 1..18: mol_type = other DNA
gaagaacctgatgatgag

SEQ ID NO: 297 - DNA, 18 bp, synthetic construct
  source 1..18: mol_type = other DNA
ggaagaacctgatgatga

SEQ ID NO: 298 - DNA, 18 bp, synthetic construct
  source 1..18: mol_type = other DNA
aggaagaacctgatgatg

SEQ ID NO: 299 - DNA, 18 bp, synthetic construct
  source 1..18: mol_type = other DNA
aaggaagaacctgatgat

SEQ ID NO: 300 - DNA, 18 bp, synthetic construct
  source 1..18: mol_type = other DNA
gaaggaagaacctgatga

SEQ ID NO: 301 - DNA, 18 bp, synthetic construct
  source 1..18: mol_type = other DNA
agaaggaagaacctgatg

SEQ ID NO: 302 - DNA, 18 bp, synthetic construct
  source 1..18: mol_type = other DNA
tagaaggaagaacctgat

SEQ ID NO: 303 - DNA, 18 bp, synthetic construct
  source 1..18: mol_type = other DNA
atagaaggaagaacctga

SEQ ID NO: 304 - DNA, 18 bp, synthetic construct
  source 1..18: mol_type = other DNA
aatagaaggaagaacctg

SEQ ID NO: 305 - DNA, 18 bp, synthetic construct
  source 1..18: mol_type = other DNA
gaatagaaggaagaacct

SEQ ID NO: 306 - DNA, 18 bp, synthetic construct
  source 1..18: mol_type = other DNA
ggaatagaaggaagaacc

SEQ ID NO: 307 - DNA, 18 bp, synthetic construct
  source 1..18: mol_type = other DNA
tggaatagaaggaagaac

SEQ ID NO: 308 - DNA, 18 bp, synthetic construct
  source 1..18: mol_type = other DNA
ctggaatagaaggaagaa

SEQ ID NO: 309 - DNA, 18 bp, synthetic construct
  source 1..18: mol_type = other DNA
gctggaatagaaggaaga

SEQ ID NO: 310 - DNA, 18 bp, synthetic construct
  source 1..18: mol_type = other DNA
ggctggaatagaaggaag

SEQ ID NO: 311 - DNA, 18 bp, synthetic construct
  source 1..18: mol_type = other DNA
agggctggaatagaagga

SEQ ID NO: 312 - DNA, 18 bp, synthetic construct
  source 1..18: mol_type = other DNA
tagggctggaatagaagg

SEQ ID NO: 313 - DNA, 18 bp, synthetic construct
  source 1..18: mol_type = other DNA
ttagggctggaatagaag

SEQ ID NO: 314 - DNA, 18 bp, synthetic construct
  source 1..18: mol_type = other DNA
gttagggctggaatagaa

SEQ ID NO: 315 - DNA, 18 bp, synthetic construct
  source 1..18: mol_type = other DNA
ggttagggctggaataga

SEQ ID NO: 316 - DNA, 18 bp, synthetic construct
  source 1..18: mol_type = other DNA
tggttagggctggaatag

SEQ ID NO: 317 - DNA, 18 bp, synthetic construct
  source 1..18: mol_type = other DNA
gtggttagggctggaata

SEQ ID NO: 318 - DNA, 18 bp, synthetic construct
  source 1..18: mol_type = other DNA
agtggttagggctggaat

SEQ ID NO: 319 - DNA, 18 bp, synthetic construct
  source 1..18: mol_type = other DNA
gagtggttagggctggaa

SEQ ID NO: 320 - DNA, 18 bp, synthetic construct
  source 1..18: mol_type = other DNA
tgagtggttagggctgga

SEQ ID NO: 321 - DNA, 18 bp, synthetic construct
  source 1..18: mol_type = other DNA
ctgagtggttagggctgg

SEQ ID NO: 322 - DNA, 18 bp, synthetic construct
  source 1..18: mol_type = other DNA
cctgagtggttagggctg

SEQ ID NO: 323 - DNA, 18 bp, synthetic construct
  source 1..18: mol_type = other DNA
tcctgagtggttagggct

SEQ ID NO: 324 - DNA, 18 bp, synthetic construct
  source 1..18: mol_type = other DNA
atcctgagtggttagggc

SEQ ID NO: 325 - DNA, 18 bp, synthetic construct
  source 1..18: mol_type = other DNA
aatcctgagtggttaggg

SEQ ID NO: 326 - DNA, 18 bp, synthetic construct
  source 1..18: mol_type = other DNA
caatcctgagtggttagg

SEQ ID NO: 327 - DNA, 18 bp, synthetic construct
  source 1..18: mol_type = other DNA
cccaatcctgagtggtta

SEQ ID NO: 328 - DNA, 18 bp, synthetic construct
  source 1..18: mol_type = other DNA
gcccaatcctgagtggtt

SEQ ID NO: 329 - DNA, 18 bp, synthetic construct
  source 1..18: mol_type = other DNA
ggcccaatcctgagtggt

SEQ ID NO: 330 - DNA, 18 bp, synthetic construct
  source 1..18: mol_type = other DNA
cggcccaatcctgagtgg

SEQ ID NO: 331 - DNA, 18 bp, synthetic construct
  source 1..18: mol_type = other DNA
acggcccaatcctgagtg

SEQ ID NO: 332 - DNA, 18 bp, synthetic construct
  source 1..18: mol_type = other DNA
aacggcccaatcctgagt

SEQ ID NO: 333 - DNA, 18 bp, synthetic construct
  source 1..18: mol_type = other DNA
aaacggcccaatcctgag

SEQ ID NO: 334 - DNA, 18 bp, synthetic construct
  source 1..18: mol_type = other DNA
caaacggcccaatcctga

SEQ ID NO: 335 - DNA, 18 bp, synthetic construct
  source 1..18: mol_type = other DNA
acaaacggcccaatcctg

SEQ ID NO: 336 - DNA, 18 bp, synthetic construct
  source 1..18: mol_type = other DNA
cacaaacggcccaatcct

SEQ ID NO: 337 - DNA, 18 bp, synthetic construct
  source 1..18: mol_type = other DNA
acacaaacggcccaatcc

SEQ ID NO: 338 - DNA, 18 bp, synthetic construct
  source 1..18: mol_type = other DNA
gacacaaacggcccaatc

SEQ ID NO: 339 - DNA, 18 bp, synthetic construct
  source 1..18: mol_type = other DNA
agacacaaacggcccaat

SEQ ID NO: 340 - DNA, 18 bp, synthetic construct
  source 1..18: mol_type = other DNA
cagacacaaacggcccaa

SEQ ID NO: 341 - DNA, 18 bp, synthetic construct
  source 1..18: mol_type = other DNA
ccagacacaaacggccca

SEQ ID NO: 342 - DNA, 18 bp, synthetic construct
  source 1..18: mol_type = other DNA
acccagacacaaacggcc

SEQ ID NO: 343 - DNA, 18 bp, synthetic construct
  source 1..18: mol_type = other DNA
tacccagacacaaacggc

SEQ ID NO: 344 - DNA, 18 bp, synthetic construct
  source 1..18: mol_type = other DNA
atacccagacacaaacgg

SEQ ID NO: 345 - DNA, 18 bp, synthetic construct
  source 1..18: mol_type = other DNA
catacccagacacaaacg

SEQ ID NO: 346 - DNA, 18 bp, synthetic construct
  source 1..18: mol_type = other DNA
acatacccagacacaaac

SEQ ID NO: 347 - DNA, 18 bp, synthetic construct
  source 1..18: mol_type = other DNA
gacatacccagacacaaa

SEQ ID NO: 348 - DNA, 18 bp, synthetic construct
  source 1..18: mol_type = other DNA
agacatacccagacacaa

SEQ ID NO: 349 - DNA, 18 bp, synthetic construct
  source 1..18: mol_type = other DNA
gagacatacccagacaca

SEQ ID NO: 350 - DNA, 18 bp, synthetic construct
  source 1..18: mol_type = other DNA
agagacatacccagacac

SEQ ID NO: 351 - DNA, 18 bp, synthetic construct
  source 1..18: mol_type = other DNA
aagagacatacccagaca

SEQ ID NO: 352 - DNA, 18 bp, synthetic construct
  source 1..18: mol_type = other DNA
gaagagacatacccagac

SEQ ID NO: 353 - DNA, 18 bp, synthetic construct
  source 1..18: mol_type = other DNA
ggaagagacatacccaga

SEQ ID NO: 354 - DNA, 18 bp, synthetic construct
  source 1..18: mol_type = other DNA
tggaagagacatacccag

SEQ ID NO: 355 - DNA, 18 bp, synthetic construct
  source 1..18: mol_type = other DNA
ctggaagagacataccca

SEQ ID NO: 356 - DNA, 18 bp, synthetic construct
  source 1..18: mol_type = other DNA
gctggaagagacataccc

SEQ ID NO: 357 - DNA, 18 bp, synthetic construct
  source 1..18: mol_type = other DNA
agctggaagagacatacc

SEQ ID NO: 358 - DNA, 18 bp, synthetic construct
  source 1..18: mol_type = other DNA
cagctggaagagacatac

SEQ ID NO: 359 - DNA, 18 bp, synthetic construct
  source 1..18: mol_type = other DNA
gcagctggaagagacata

SEQ ID NO: 360 - DNA, 18 bp, synthetic construct
  source 1..18: mol_type = other DNA
aggcagctggaagagaca

SEQ ID NO: 361 - DNA, 18 bp, synthetic construct
  source 1..18: mol_type = other DNA
caggcagctggaagagac

SEQ ID NO: 362 - DNA, 18 bp, synthetic construct
  source 1..18: mol_type = other DNA
ccaggcagctggaagaga

SEQ ID NO: 363 - DNA, 18 bp, synthetic construct
  source 1..18: mol_type = other DNA
cccaggcagctggaagag

SEQ ID NO: 364 - DNA, 18 bp, synthetic construct
  source 1..18: mol_type = other DNA
acccaggcagctggaaga

SEQ ID NO: 365 - DNA, 18 bp, synthetic construct
  source 1..18: mol_type = other DNA
aacccaggcagctggaag

SEQ ID NO: 366 - DNA, 18 bp, synthetic construct
  source 1..18: mol_type = other DNA
aaacccaggcagctggaa

SEQ ID NO: 367 - DNA, 18 bp, synthetic construct
  source 1..18: mol_type = other DNA
gaaacccaggcagctgga

SEQ ID NO: 368 - DNA, 18 bp, synthetic construct
  source 1..18: mol_type = other DNA
ggaaacccaggcagctgg

SEQ ID NO: 369 - DNA, 18 bp, synthetic construct
  source 1..18: mol_type = other DNA
aggaaacccaggcagctg

SEQ ID NO: 370 - DNA, 18 bp, synthetic construct
  source 1..18: mol_type = other DNA
caggaaacccaggcagct

SEQ ID NO: 371 - DNA, 18 bp, synthetic construct
  source 1..18: mol_type = other DNA
ccaggaaacccaggcagc

SEQ ID NO: 372 - DNA, 18 bp, synthetic construct
  source 1..18: mol_type = other DNA
tccaggaaacccaggcag

SEQ ID NO: 373 - DNA, 18 bp, synthetic construct
  source 1..18: mol_type = other DNA
ttccaggaaacccaggca

SEQ ID NO: 374 - DNA, 18 bp, synthetic construct
  source 1..18: mol_type = other DNA
tttccaggaaacccaggc

SEQ ID NO: 375 - DNA, 18 bp, synthetic construct
  source 1..18: mol_type = other DNA
ctttccaggaaacccagg

SEQ ID NO: 376 - DNA, 18 bp, synthetic construct
  source 1..18: mol_type = other DNA
tctttccaggaaacccag

SEQ ID NO: 377 - DNA, 18 bp, synthetic construct
  source 1..18: mol_type = other DNA
ttctttccaggaaaccca

SEQ ID NO: 378 - DNA, 18 bp, synthetic construct
  source 1..18: mol_type = other DNA
agttctttccaggaaacc

SEQ ID NO: 379 - DNA, 18 bp, synthetic construct
  source 1..18: mol_type = other DNA
gagttctttccaggaaac

SEQ ID NO: 380 - DNA, 18 bp, synthetic construct
  source 1..18: mol_type = other DNA
agagttctttccaggaaa

SEQ ID NO: 381 - DNA, 18 bp, synthetic construct
  source 1..18: mol_type = other DNA
aagagttctttccaggaa

SEQ ID NO: 382 - DNA, 18 bp, synthetic construct
  source 1..18: mol_type = other DNA
taagagttctttccagga

SEQ ID NO: 383 - DNA, 18 bp, synthetic construct
  source 1..18: mol_type = other DNA
ataagagttctttccagg

SEQ ID NO: 384 - DNA, 18 bp, synthetic construct
  source 1..18: mol_type = other DNA
gataagagttctttccag

SEQ ID NO: 385 - DNA, 18 bp, synthetic construct
  source 1..18: mol_type = other DNA
ggataagagttctttcca

SEQ ID NO: 386 - DNA, 18 bp, synthetic construct
  source 1..18: mol_type = other DNA
gggataagagttctttcc

SEQ ID NO: 387 - DNA, 18 bp, synthetic construct
  source 1..18: mol_type = other DNA
ggggataagagttctttc

SEQ ID NO: 388 - DNA, 18 bp, synthetic construct
  source 1..18: mol_type = other DNA
tggggataagagttcttt

SEQ ID NO: 389 - DNA, 18 bp, synthetic construct
  source 1..18: mol_type = other DNA
ctggggataagagttctt

SEQ ID NO: 390 - DNA, 18 bp, synthetic construct
  source 1..18: mol_type = other DNA
cctggggataagagttct

SEQ ID NO: 391 - DNA, 18 bp, synthetic construct
  source 1..18: mol_type = other DNA
tcctggggataagagttc

SEQ ID NO: 392 - DNA, 18 bp, synthetic construct
  source 1..18: mol_type = other DNA
ttcctggggataagagtt

SEQ ID NO: 393 - DNA, 18 bp, synthetic construct
  source 1..18: mol_type = other DNA
agttcctggggataagag

SEQ ID NO: 394 - DNA, 18 bp, synthetic construct
  source 1..18: mol_type = other DNA
tagttcctggggataaga

SEQ ID NO: 395 - DNA, 18 bp, synthetic construct
  source 1..18: mol_type = other DNA
ctagttcctggggataag

SEQ ID NO: 396 - DNA, 18 bp, synthetic construct
  source 1..18: mol_type = other DNA
actagttcctggggataa

SEQ ID NO: 397 - DNA, 18 bp, synthetic construct
  source 1..18: mol_type = other DNA
aactagttcctggggata

SEQ ID NO: 398 - DNA, 18 bp, synthetic construct
  source 1..18: mol_type = other DNA
aaactagttcctggggat

SEQ ID NO: 399 - DNA, 18 bp, synthetic construct
  source 1..18: mol_type = other DNA
caaactagttcctgggga

SEQ ID NO: 400 - DNA, 18 bp, synthetic construct
  source 1..18: mol_type = other DNA
acaaactagttcctgggg

SEQ ID NO: 401 - DNA, 18 bp, synthetic construct
  source 1..18: mol_type = other DNA
aacaaactagttcctggg

SEQ ID NO: 402 - DNA, 18 bp, synthetic construct
  source 1..18: mol_type = other DNA
caacaaactagttcctgg

SEQ ID NO: 403 - DNA, 18 bp, synthetic construct
  source 1..18: mol_type = other DNA
tcaacaaactagttcctg

SEQ ID NO: 404 - DNA, 18 bp, synthetic construct
  source 1..18: mol_type = other DNA
ttcaacaaactagttcct

SEQ ID NO: 405 - DNA, 18 bp, synthetic construct
  source 1..18: mol_type = other DNA
attcaacaaactagttcc

SEQ ID NO: 406 - DNA, 18 bp, synthetic construct
  source 1..18: mol_type = other DNA
ttattcaacaaactagtt

SEQ ID NO: 407 - DNA, 18 bp, synthetic construct
  source 1..18: mol_type = other DNA
tttattcaacaaactagt

SEQ ID NO: 408 - DNA, 18 bp, synthetic construct
  source 1..18: mol_type = other DNA
atttattcaacaaactag

SEQ ID NO: 409 - DNA, 18 bp, synthetic construct
  source 1..18: mol_type = other DNA
catttattcaacaaacta

SEQ ID NO: 410 - DNA, 18 bp, synthetic construct
  source 1..18: mol_type = other DNA
gcatttattcaacaaact

SEQ ID NO: 411 - DNA, 18 bp, synthetic construct
  source 1..18: mol_type = other DNA
agcatttattcaacaaac

SEQ ID NO: 412 - DNA, 18 bp, synthetic construct
  source 1..18: mol_type = other DNA
cagcatttattcaacaaa

SEQ ID NO: 413 - DNA, 18 bp, synthetic construct
  source 1..18: mol_type = other DNA
ccagcatttattcaacaa

SEQ ID NO: 414 - DNA, 18 bp, synthetic construct
  source 1..18: mol_type = other DNA
accagcatttattcaaca

SEQ ID NO: 415 - DNA, 18 bp, synthetic construct
  source 1..18: mol_type = other DNA
caccagcatttattcaac

SEQ ID NO: 416 - DNA, 18 bp, synthetic construct
  source 1..18: mol_type = other DNA
tcaccagcatttattcaa

SEQ ID NO: 417 - DNA, 18 bp, synthetic construct
  source 1..18: mol_type = other DNA
ttcaccagcatttattca

SEQ ID NO: 418 - DNA, 18 bp, synthetic construct
  source 1..18: mol_type = other DNA
attcaccagcatttattc

SEQ ID NO: 419 - DNA, 18 bp, synthetic construct
  source 1..18: mol_type = other DNA
cattcaccagcatttatt

SEQ ID NO: 420 - DNA, 18 bp, synthetic construct
  source 1..18: mol_type = other DNA
tcattcaccagcatttat

SEQ ID NO: 421 - DNA, 18 bp, synthetic construct
  source 1..18: mol_type = other DNA
ttcattcaccagcattta

SEQ ID NO: 422 - DNA, 18 bp, synthetic construct
  source 1..18: mol_type = other DNA
attcattcaccagcattt

SEQ ID NO: 423 - DNA, 18 bp, synthetic construct
  source 1..18: mol_type = other DNA
cattcattcaccagcatt

SEQ ID NO: 424 - DNA, 18 bp, synthetic construct
  source 1..18: mol_type = other DNA
ttcattcattcaccagca

SEQ ID NO: 425 - DNA, 18 bp, synthetic construct
  source 1..18: mol_type = other DNA
attcattcattcaccagc

SEQ ID NO: 426 - DNA, 18 bp, synthetic construct
  source 1..18: mol_type = other DNA
cattcattcattcaccag

SEQ ID NO: 427 - DNA, 18 bp, synthetic construct
  source 1..18: mol_type = other DNA
tcattcattcattcacca

SEQ ID NO: 428 - DNA, 18 bp, synthetic construct
  source 1..18: mol_type = other DNA
atcattcattcattcacc

SEQ ID NO: 429 - DNA, 18 bp, synthetic construct
  source 1..18: mol_type = other DNA
aatcattcattcattcac

SEQ ID NO: 430 - DNA, 18 bp, synthetic construct
  source 1..18: mol_type = other DNA
caatcattcattcattca

SEQ ID NO: 431 - DNA, 18 bp, synthetic construct
  source 1..18: mol_type = other DNA
tcaatcattcattcattc

SEQ ID NO: 432 - DNA, 18 bp, synthetic construct
  source 1..18: mol_type = other DNA
ttcaatcattcattcatt

SEQ ID NO: 433 - DNA, 18 bp, synthetic construct
  source 1..18: mol_type = other DNA
gttcaatcattcattcat

SEQ ID NO: 434 - DNA, 18 bp, synthetic construct
  source 1..18: mol_type = other DNA
tgttcaatcattcattca

SEQ ID NO: 435 - DNA, 18 bp, synthetic construct
  source 1..18: mol_type = other DNA
ctgttcaatcattcattc

SEQ ID NO: 436 - DNA, 18 bp, synthetic construct
  source 1..18: mol_type = other DNA
tctgttcaatcattcatt

SEQ ID NO: 437 - DNA, 18 bp, synthetic construct
  source 1..18: mol_type = other DNA
atctgttcaatcattcat

SEQ ID NO: 438 - DNA, 18 bp, synthetic construct
  source 1..18: mol_type = other DNA
tcatctgttcaatcattc

SEQ ID NO: 439 - DNA, 18 bp, synthetic construct
  source 1..18: mol_type = other DNA
ttcatctgttcaatcatt

SEQ ID NO: 440 - DNA, 18 bp, synthetic construct
  source 1..18: mol_type = other DNA
attcatctgttcaatcat

SEQ ID NO: 441 - DNA, 18 bp, synthetic construct
  source 1..18: mol_type = other DNA
cattcatctgttcaatca

SEQ ID NO: 442 - DNA, 18 bp, synthetic construct
  source 1..18: mol_type = other DNA
tcattcatctgttcaatc

SEQ ID NO: 443 - DNA, 18 bp, synthetic construct
  source 1..18: mol_type = other DNA
ctcattcatctgttcaat

SEQ ID NO: 444 - DNA, 18 bp, synthetic construct
  source 1..18: mol_type = other DNA
actcattcatctgttcaa

SEQ ID NO: 445 - DNA, 18 bp, synthetic construct
  source 1..18: mol_type = other DNA
cactcattcatctgttca

SEQ ID NO: 446 - DNA, 18 bp, synthetic construct
  source 1..18: mol_type = other DNA
tcactcattcatctgttc

SEQ ID NO: 447 - DNA, 18 bp, synthetic construct
  source 1..18: mol_type = other DNA
atcactcattcatctgtt

SEQ ID NO: 448 - DNA, 18 bp, synthetic construct
  source 1..18: mol_type = other DNA
catcactcattcatctgt

SEQ ID NO: 449 - DNA, 18 bp, synthetic construct
  source 1..18: mol_type = other DNA
tcatcactcattcatctg

SEQ ID NO: 450 - DNA, 18 bp, synthetic construct
  source 1..18: mol_type = other DNA
ctcatcactcattcatct

SEQ ID NO: 451 - DNA, 18 bp, synthetic construct
  source 1..18: mol_type = other DNA
actcatcactcattcatc

SEQ ID NO: 452 - DNA, 18 bp, synthetic construct
  source 1..18: mol_type = other DNA
tactcatcactcattcat

SEQ ID NO: 453 - DNA, 18 bp, synthetic construct
  source 1..18: mol_type = other DNA
tctactcatcactcattc

SEQ ID NO: 454 - DNA, 18 bp, synthetic construct
  source 1..18: mol_type = other DNA
atctactcatcactcatt

SEQ ID NO: 455 - DNA, 18 bp, synthetic construct
  source 1..18: mol_type = other DNA
tatctactcatcactcat

SEQ ID NO: 456 - DNA, 18 bp, synthetic construct
  source 1..18: mol_type = other DNA
ttatctactcatcactca

SEQ ID NO: 457 - DNA, 18 bp, synthetic construct
  source 1..18: mol_type = other DNA
tttatctactcatcactc

SEQ ID NO: 458 - DNA, 18 bp, synthetic construct
  source 1..18: mol_type = other DNA
ttttatctactcatcact

SEQ ID NO: 459 - DNA, 18 bp, synthetic construct
  source 1..18: mol_type = other DNA
cttttatctactcatcac

SEQ ID NO: 460 - DNA, 18 bp, synthetic construct
  source 1..18: mol_type = other DNA
ccttttatctactcatca

SEQ ID NO: 461 - DNA, 18 bp, synthetic construct
  source 1..18: mol_type = other DNA
tccttttatctactcatc

SEQ ID NO: 462 - DNA, 18 bp, synthetic construct
  source 1..18: mol_type = other DNA
atccttttatctactcat

SEQ ID NO: 463 - DNA, 18 bp, synthetic construct
  source 1..18: mol_type = other DNA
catccttttatctactca

SEQ ID NO: 464 - DNA, 18 bp, synthetic construct
  source 1..18: mol_type = other DNA
ccatccttttatctactc

SEQ ID NO: 465 - DNA, 18 bp, synthetic construct
  source 1..18: mol_type = other DNA
tccatccttttatctact

SEQ ID NO: 466 - DNA, 18 bp, synthetic construct
  source 1..18: mol_type = other DNA
atccatccttttatctac

SEQ ID NO: 467 - DNA, 18 bp, synthetic construct
  source 1..18: mol_type = other DNA
catccatccttttatcta

SEQ ID NO: 468 - DNA, 18 bp, synthetic construct
  source 1..18: mol_type = other DNA
ccatccatccttttatct

SEQ ID NO: 469 - DNA, 18 bp, synthetic construct
  source 1..18: mol_type = other DNA
tccatccatccttttatc

SEQ ID NO: 470 - DNA, 18 bp, synthetic construct
  source 1..18: mol_type = other DNA
ctccatccatccttttat

SEQ ID NO: 471 - DNA, 18 bp, synthetic construct
  source 1..18: mol_type = other DNA
ctctccatccatcctttt

SEQ ID NO: 472 - DNA, 18 bp, synthetic construct
  source 1..18: mol_type = other DNA
tctctccatccatccttt

SEQ ID NO: 473 - DNA, 18 bp, synthetic construct
  source 1..18: mol_type = other DNA
atctctccatccatcctt

SEQ ID NO: 474 - DNA, 18 bp, synthetic construct
  source 1..18: mol_type = other DNA
catctctccatccatcct

SEQ ID NO: 475 - DNA, 18 bp, synthetic construct
  source 1..18: mol_type = other DNA
ccatctctccatccatcc

SEQ ID NO: 476 - DNA, 18 bp, synthetic construct
  source 1..18: mol_type = other DNA
cccatctctccatccatc

SEQ ID NO: 477 - DNA, 18 bp, synthetic construct
  source 1..18: mol_type = other DNA
acccatctctccatccat

SEQ ID NO: 478 - DNA, 18 bp, synthetic construct
  source 1..18: mol_type = other DNA
cacccatctctccatcca

SEQ ID NO: 479 - DNA, 18 bp, synthetic construct
  source 1..18: mol_type = other DNA
tcacccatctctccatcc

SEQ ID NO: 480 - DNA, 18 bp, synthetic construct
  source 1..18: mol_type = other DNA
ctcacccatctctccatc

SEQ ID NO: 481 - DNA, 18 bp, synthetic construct
  source 1..18: mol_type = other DNA
actcacccatctctccat

SEQ ID NO: 482 - DNA, 18 bp, synthetic construct
  source 1..18: mol_type = other DNA
tactcacccatctctcca

SEQ ID NO: 483 - DNA, 18 bp, synthetic construct
  source 1..18: mol_type = other DNA
gtactcacccatctctcc

SEQ ID NO: 484 - DNA, 18 bp, synthetic construct
  source 1..18: mol_type = other DNA
tgtactcacccatctctc

SEQ ID NO: 485 - DNA, 18 bp, synthetic construct
  source 1..18: mol_type = other DNA
catgtactcacccatctc

SEQ ID NO: 486 - DNA, 18 bp, synthetic construct
  source 1..18: mol_type = other DNA
ccatgtactcacccatct

SEQ ID NO: 487 - DNA, 18 bp, synthetic construct
  source 1..18: mol_type = other DNA
tccatgtactcacccatc

SEQ ID NO: 488 - DNA, 18 bp, synthetic construct
  source 1..18: mol_type = other DNA
atccatgtactcacccat

SEQ ID NO: 489 - DNA, 18 bp, synthetic construct
  source 1..18: mol_type = other DNA
catccatgtactcaccca

SEQ ID NO: 490 - DNA, 18 bp, synthetic construct
  source 1..18: mol_type = other DNA
ccatccatgtactcaccc

SEQ ID NO: 491 - DNA, 18 bp, synthetic construct
  source 1..18: mol_type = other DNA
tccatccatgtactcacc

SEQ ID NO: 492 - DNA, 18 bp, synthetic construct
  source 1..18: mol_type = other DNA
atccatccatgtactcac

SEQ ID NO: 493 - DNA, 18 bp, synthetic construct
  source 1..18: mol_type = other DNA
tatccatccatgtactca

SEQ ID NO: 494 - DNA, 18 bp, synthetic construct
  source 1..18: mol_type = other DNA
ctatccatccatgtactc

SEQ ID NO: 495 - DNA, 18 bp, synthetic construct
  source 1..18: mol_type = other DNA
tctatccatccatgtact

SEQ ID NO: 496 - DNA, 18 bp, synthetic construct
  source 1..18: mol_type = other DNA
atctatccatccatgtac

SEQ ID NO: 497 - DNA, 18 bp, synthetic construct
  source 1..18: mol_type = other DNA
catctatccatccatgta

SEQ ID NO: 498 - DNA, 18 bp, synthetic construct
  source 1..18: mol_type = other DNA
ccatctatccatccatgt

SEQ ID NO: 499 - DNA, 18 bp, synthetic construct
  source 1..18: mol_type = other DNA
atccatctatccatccat

SEQ ID NO: 500 - DNA, 18 bp, synthetic construct
  source 1..18: mol_type = other DNA
catccatctatccatcca

SEQ ID NO: 501 - DNA, 18 bp, synthetic construct
  source 1..18: mol_type = other DNA
tcatccatctatccatcc

SEQ ID NO: 502 - DNA, 18 bp, synthetic construct
  source 1..18: mol_type = other DNA
ctcatccatctatccatc

SEQ ID NO: 503 - DNA, 18 bp, synthetic construct
  source 1..18: mol_type = other DNA
actcatccatctatccat

SEQ ID NO: 504 - DNA, 18 bp, synthetic construct
  source 1..18: mol_type = other DNA
aactcatccatctatcca

SEQ ID NO: 505 - DNA, 18 bp, synthetic construct
  source 1..18: mol_type = other DNA
caactcatccatctatcc

SEQ ID NO: 506 - DNA, 18 bp, synthetic construct
  source 1..18: mol_type = other DNA
ccaactcatccatctatc

SEQ ID NO: 507 - DNA, 18 bp, synthetic construct
  source 1..18: mol_type = other DNA
accaactcatccatctat

SEQ ID NO: 508 - DNA, 18 bp, synthetic construct
  source 1..18: mol_type = other DNA
caccaactcatccatcta

SEQ ID NO: 509 - DNA, 18 bp, synthetic construct
  source 1..18: mol_type = other DNA
ccaccaactcatccatct

SEQ ID NO: 510 - DNA, 18 bp, synthetic construct
  source 1..18: mol_type = other DNA
cccaccaactcatccatc

SEQ ID NO: 511 - DNA, 18 bp, synthetic construct
  source 1..18: mol_type = other DNA
acccaccaactcatccat

SEQ ID NO: 512 - DNA, 18 bp, synthetic construct
  source 1..18: mol_type = other DNA
tacccaccaactcatcca

SEQ ID NO: 513 - DNA, 18 bp, synthetic construct
  source 1..18: mol_type = other DNA
ctacccaccaactcatcc

SEQ ID NO: 514 - DNA, 18 bp, synthetic construct
  source 1..18: mol_type = other DNA
atctacccaccaactcat

SEQ ID NO: 515 - DNA, 18 bp, synthetic construct
  source 1..18: mol_type = other DNA
aatctacccaccaactca

SEQ ID NO: 516 - DNA, 18 bp, synthetic construct
  source 1..18: mol_type = other DNA
gaatctacccaccaactc

SEQ ID NO: 517 - DNA, 18 bp, synthetic construct
  source 1..18: mol_type = other DNA
cgaatctacccaccaact

SEQ ID NO: 518 - DNA, 18 bp, synthetic construct
  source 1..18: mol_type = other DNA
acgaatctacccaccaac

SEQ ID NO: 519 - DNA, 18 bp, synthetic construct
  source 1..18: mol_type = other DNA
cacgaatctacccaccaa

SEQ ID NO: 520 - DNA, 18 bp, synthetic construct
  source 1..18: mol_type = other DNA
ccacgaatctacccacca

SEQ ID NO: 521 - DNA, 18 bp, synthetic construct
  source 1..18: mol_type = other DNA
gccacgaatctacccacc

SEQ ID NO: 522 - DNA, 18 bp, synthetic construct
  source 1..18: mol_type = other DNA
agccacgaatctacccac

SEQ ID NO: 523 - DNA, 18 bp, synthetic construct
  source 1..18: mol_type = other DNA
tagccacgaatctaccca

SEQ ID NO: 524 - DNA, 18 bp, synthetic construct
  source 1..18: mol_type = other DNA
ctagccacgaatctaccc

SEQ ID NO: 525 - DNA, 18 bp, synthetic construct
  source 1..18: mol_type = other DNA
tctagccacgaatctacc

SEQ ID NO: 526 - DNA, 18 bp, synthetic construct
  source 1..18: mol_type = other DNA
atctagccacgaatctac

SEQ ID NO: 527 - DNA, 18 bp, synthetic construct
  source 1..18: mol_type = other DNA
catctagccacgaatcta

SEQ ID NO: 528 - DNA, 18 bp, synthetic construct
  source 1..18: mol_type = other DNA
tccatctagccacgaatc

SEQ ID NO: 529 - DNA, 18 bp, synthetic construct
  source 1..18: mol_type = other DNA
atccatctagccacgaat

SEQ ID NO: 530 - DNA, 18 bp, synthetic construct
  source 1..18: mol_type = other DNA
catccatctagccacgaa

SEQ ID NO: 531 - DNA, 18 bp, synthetic construct
  source 1..18: mol_type = other DNA
tcatccatctagccacga

SEQ ID NO: 532 - DNA, 18 bp, synthetic construct
  source 1..18: mol_type = other DNA
atcatccatctagccacg

SEQ ID NO: 533 - DNA, 18 bp, synthetic construct
  source 1..18: mol_type = other DNA
catcatccatctagccac

SEQ ID NO: 534 - DNA, 18 bp, synthetic construct
  source 1..18: mol_type = other DNA
ccatcatccatctagcca

SEQ ID NO: 535 - DNA, 18 bp, synthetic construct
  source 1..18: mol_type = other DNA
tccatcatccatctagcc

SEQ ID NO: 536 - DNA, 18 bp, synthetic construct
  source 1..18: mol_type = other DNA
atccatcatccatctagc

SEQ ID NO: 537 - DNA, 18 bp, synthetic construct
  source 1..18: mol_type = other DNA
catccatcatccatctag

SEQ ID NO: 538 - DNA, 18 bp, synthetic construct
  source 1..18: mol_type = other DNA
ccatccatcatccatcta

SEQ ID NO: 539 - DNA, 18 bp, synthetic construct
  source 1..18: mol_type = other DNA
tccatccatcatccatct

SEQ ID NO: 540 - DNA, 18 bp, synthetic construct
  source 1..18: mol_type = other DNA
atccatccatcatccatc

SEQ ID NO: 541 - DNA, 18 bp, synthetic construct
  source 1..18: mol_type = other DNA
catccatccatcatccat

SEQ ID NO: 542 - DNA, 18 bp, synthetic construct
  source 1..18: mol_type = other DNA
ccatccatccatcatcca

SEQ ID NO: 543 - DNA, 18 bp, synthetic construct
  source 1..18: mol_type = other DNA
tccatccatccatcatcc

SEQ ID NO: 544 - DNA, 18 bp, synthetic construct
  source 1..18: mol_type = other DNA
gtccatccatccatcatc

SEQ ID NO: 545 - DNA, 18 bp, synthetic construct
  source 1..18: mol_type = other DNA
tgtccatccatccatcat

SEQ ID NO: 546 - DNA, 18 bp, synthetic construct
  source 1..18: mol_type = other DNA
tctgtccatccatccatc

SEQ ID NO: 547 - DNA, 18 bp, synthetic construct
  source 1..18: mol_type = other DNA
atctgtccatccatccat

SEQ ID NO: 548 - DNA, 18 bp, synthetic construct
  source 1..18: mol_type = other DNA
catctgtccatccatcca

SEQ ID NO: 549 - DNA, 18 bp, synthetic construct
  source 1..18: mol_type = other DNA
ccatctgtccatccatcc

SEQ ID NO: 550 - DNA, 18 bp, synthetic construct
  source 1..18: mol_type = other DNA
tccatctgtccatccatc

SEQ ID NO: 551 - DNA, 18 bp, synthetic construct
  source 1..18: mol_type = other DNA
atccatctgtccatccat

SEQ ID NO: 552 - DNA, 18 bp, synthetic construct
  source 1..18: mol_type = other DNA
catccatctgtccatcca

SEQ ID NO: 553 - DNA, 18 bp, synthetic construct
  source 1..18: mol_type = other DNA
ccatccatctgtccatcc

SEQ ID NO: 554 - DNA, 18 bp, synthetic construct
  source 1..18: mol_type = other DNA
tccatccatctgtccatc

SEQ ID NO: 555 - DNA, 18 bp, synthetic construct
  source 1..18: mol_type = other DNA
atccatccatctgtccat

SEQ ID NO: 556 - DNA, 18 bp, synthetic construct
  source 1..18: mol_type = other DNA
tatccatccatctgtcca

SEQ ID NO: 557 - DNA, 18 bp, synthetic construct
  source 1..18: mol_type = other DNA
atatccatccatctgtcc

SEQ ID NO: 558 - DNA, 18 bp, synthetic construct
  source 1..18: mol_type = other DNA
tatatccatccatctgtc

SEQ ID NO: 559 - DNA, 18 bp, synthetic construct
  source 1..18: mol_type = other DNA
atatatccatccatctgt

SEQ ID NO: 560 - DNA, 18 bp, synthetic construct
  source 1..18: mol_type = other DNA
catatatccatccatctg

SEQ ID NO: 561 - DNA, 18 bp, synthetic construct
  source 1..18: mol_type = other DNA
atcatatatccatccatc

SEQ ID NO: 562 - DNA, 18 bp, synthetic construct
  source 1..18: mol_type = other DNA
aatcatatatccatccat

SEQ ID NO: 563 - DNA, 18 bp, synthetic construct
  source 1..18: mol_type = other DNA
caatcatatatccatcca

SEQ ID NO: 564 - DNA, 18 bp, synthetic construct
  source 1..18: mol_type = other DNA
tcaatcatatatccatcc

SEQ ID NO: 565 - DNA, 18 bp, synthetic construct
  source 1..18: mol_type = other DNA
ttcaatcatatatccatc

SEQ ID NO: 566 - DNA, 18 bp, synthetic construct
  source 1..18: mol_type = other DNA
gttcaatcatatatccat

SEQ ID NO: 567 - DNA, 18 bp, synthetic construct
  source 1..18: mol_type = other DNA
agttcaatcatatatcca

SEQ ID NO: 568 - DNA, 18 bp, synthetic construct
  source 1..18: mol_type = other DNA
tagttcaatcatatatcc

SEQ ID NO: 569 - DNA, 18 bp, synthetic construct
  source 1..18: mol_type = other DNA
atagttcaatcatatatc

SEQ ID NO: 570 - DNA, 18 bp, synthetic construct
  source 1..18: mol_type = other DNA
aatagttcaatcatatat

SEQ ID NO: 571 - DNA, 18 bp, synthetic construct
  source 1..18: mol_type = other DNA
caatagttcaatcatata

SEQ ID NO: 572 - DNA, 18 bp, synthetic construct
  source 1..18: mol_type = other DNA
tcaatagttcaatcatat

SEQ ID NO: 573 - DNA, 18 bp, synthetic construct
  source 1..18: mol_type = other DNA
ttcaatagttcaatcata

SEQ ID NO: 574 - DNA, 18 bp, synthetic construct
  source 1..18: mol_type = other DNA
tttcaatagttcaatcat

SEQ ID NO: 575 - DNA, 18 bp, synthetic construct
  source 1..18: mol_type = other DNA
actttcaatagttcaatc

SEQ ID NO: 576 - DNA, 18 bp, synthetic construct
  source 1..18: mol_type = other DNA
tactttcaatagttcaat

SEQ ID NO: 577 - DNA, 18 bp, synthetic construct
  source 1..18: mol_type = other DNA
atactttcaatagttcaa

SEQ ID NO: 578 - DNA, 18 bp, synthetic construct
  source 1..18: mol_type = other DNA
tatactttcaatagttca

SEQ ID NO: 579 - DNA, 18 bp, synthetic construct
  source 1..18: mol_type = other DNA
ctatactttcaatagttc

SEQ ID NO: 580 - DNA, 18 bp, synthetic construct
  source 1..18: mol_type = other DNA
tctatactttcaatagtt

SEQ ID NO: 581 - DNA, 18 bp, synthetic construct
  source 1..18: mol_type = other DNA
atctatactttcaatagt

SEQ ID NO: 582 - DNA, 18 bp, synthetic construct
  source 1..18: mol_type = other DNA
catctatactttcaatag

SEQ ID NO: 583 - DNA, 18 bp, synthetic construct
  source 1..18: mol_type = other DNA
acatctatactttcaata

SEQ ID NO: 584 - DNA, 18 bp, synthetic construct
  source 1..18: mol_type = other DNA
tacatctatactttcaat

SEQ ID NO: 585 - DNA, 18 bp, synthetic construct
  source 1..18: mol_type = other DNA
atacatctatactttcaa

SEQ ID NO: 586 - DNA, 18 bp, synthetic construct
  source 1..18: mol_type = other DNA
catacatctatactttca

SEQ ID NO: 587 - DNA, 18 bp, synthetic construct
  source 1..18: mol_type = other DNA
ccatacatctatactttc

SEQ ID NO: 588 - DNA, 18 bp, synthetic construct
  source 1..18: mol_type = other DNA
tccatacatctatacttt

SEQ ID NO: 589 - DNA, 18 bp, synthetic construct
  source 1..18: mol_type = other DNA
atccatacatctatactt

SEQ ID NO: 590 - DNA, 18 bp, synthetic construct
  source 1..18: mol_type = other DNA
catccatacatctatact

SEQ ID NO: 591 - DNA, 18 bp, synthetic construct
  source 1..18: mol_type = other DNA
cccatccatacatctata

SEQ ID NO: 592 - DNA, 18 bp, synthetic construct
  source 1..18: mol_type = other DNA
acccatccatacatctat

SEQ ID NO: 593 - DNA, 18 bp, synthetic construct
  source 1..18: mol_type = other DNA
cacccatccatacatcta

SEQ ID NO: 594 - DNA, 18 bp, synthetic construct
  source 1..18: mol_type = other DNA
tcacccatccatacatct

SEQ ID NO: 595 - DNA, 18 bp, synthetic construct
  source 1..18: mol_type = other DNA
ttcacccatccatacatc

SEQ ID NO: 596 - DNA, 18 bp, synthetic construct
  source 1..18: mol_type = other DNA
attcacccatccatacat

SEQ ID NO: 597 - DNA, 18 bp, synthetic construct
  source 1..18: mol_type = other DNA
aattcacccatccataca

SEQ ID NO: 598 - DNA, 18 bp, synthetic construct
  source 1..18: mol_type = other DNA
aaattcacccatccatac

SEQ ID NO: 599 - DNA, 18 bp, synthetic construct
  source 1..18: mol_type = other DNA
caaattcacccatccata

SEQ ID NO: 600 - DNA, 18 bp, synthetic construct
  source 1..18: mol_type = other DNA
ccaaattcacccatccat

SEQ ID NO: 601 - DNA, 18 bp, synthetic construct
  source 1..18: mol_type = other DNA
cccaaattcacccatcca

SEQ ID NO: 602 - DNA, 18 bp, synthetic construct
  source 1..18: mol_type = other DNA
ccccaaattcacccatcc

SEQ ID NO: 603 - DNA, 18 bp, synthetic construct
  source 1..18: mol_type = other DNA
cccccaaattcacccatc

SEQ ID NO: 604 - DNA, 18 bp, synthetic construct
  source 1..18: mol_type = other DNA
acccccaaattcacccat

SEQ ID NO: 605 - DNA, 18 bp, synthetic construct
  source 1..18: mol_type = other DNA
tacccccaaattcaccca

SEQ ID NO: 606 - DNA, 18 bp, synthetic construct
  source 1..18: mol_type = other DNA
ttacccccaaattcaccc

SEQ ID NO: 607 - DNA, 18 bp, synthetic construct
  source 1..18: mol_type = other DNA
aattacccccaaattcac

SEQ ID NO: 608 - DNA, 18 bp, synthetic construct
  source 1..18: mol_type = other DNA
caattacccccaaattca

SEQ ID NO: 609 - DNA, 18 bp, synthetic construct
  source 1..18: mol_type = other DNA
acaattacccccaaattc

SEQ ID NO: 610 - DNA, 18 bp, synthetic construct
  source 1..18: mol_type = other DNA
aacaattacccccaaatt

SEQ ID NO: 611 - DNA, 18 bp, synthetic construct
  source 1..18: mol_type = other DNA
taacaattacccccaaat

SEQ ID NO: 612 - DNA, 18 bp, synthetic construct
  source 1..18: mol_type = other DNA
ctaacaattacccccaaa

SEQ ID NO: 613 - DNA, 18 bp, synthetic construct
  source 1..18: mol_type = other DNA
tctaacaattacccccaa

SEQ ID NO: 614 - DNA, 18 bp, synthetic construct
  source 1..18: mol_type = other DNA
atctaacaattaccccca

SEQ ID NO: 615 - DNA, 18 bp, synthetic construct
  source 1..18: mol_type = other DNA
catctaacaattaccccc

SEQ ID NO: 616 - DNA, 18 bp, synthetic construct
  source 1..18: mol_type = other DNA
tcatctaacaattacccc

SEQ ID NO: 617 - DNA, 18 bp, synthetic construct
  source 1..18: mol_type = other DNA
atcatctaacaattaccc

SEQ ID NO: 618 - DNA, 18 bp, synthetic construct
  source 1..18: mol_type = other DNA
catcatctaacaattacc

SEQ ID NO: 619 - DNA, 18 bp, synthetic construct
  source 1..18: mol_type = other DNA
ccatcatctaacaattac

SEQ ID NO: 620 - DNA, 18 bp, synthetic construct
  source 1..18: mol_type = other DNA
tccatcatctaacaatta

SEQ ID NO: 621 - DNA, 18 bp, synthetic construct
  source 1..18: mol_type = other DNA
catccatcatctaacaat

SEQ ID NO: 622 - DNA, 18 bp, synthetic construct
  source 1..18: mol_type = other DNA
tcatccatcatctaacaa

SEQ ID NO: 623 - DNA, 18 bp, synthetic construct
  source 1..18: mol_type = other DNA
ctcatccatcatctaaca

SEQ ID NO: 624 - DNA, 18 bp, synthetic construct
  source 1..18: mol_type = other DNA
actcatccatcatctaac

SEQ ID NO: 625 - DNA, 18 bp, synthetic construct
  source 1..18: mol_type = other DNA
tactcatccatcatctaa

SEQ ID NO: 626 - DNA, 18 bp, synthetic construct
  source 1..18: mol_type = other DNA
atactcatccatcatcta

SEQ ID NO: 627 - DNA, 18 bp, synthetic construct
  source 1..18: mol_type = other DNA
tatactcatccatcatct

SEQ ID NO: 628 - DNA, 18 bp, synthetic construct
  source 1..18: mol_type = other DNA
ctatactcatccatcatc

SEQ ID NO: 629 - DNA, 18 bp, synthetic construct
  source 1..18: mol_type = other DNA
tctatactcatccatcat

SEQ ID NO: 630 - DNA, 18 bp, synthetic construct
  source 1..18: mol_type = other DNA
atctatactcatccatca

SEQ ID NO: 631 - DNA, 18 bp, synthetic construct
  source 1..18: mol_type = other DNA
catctatactcatccatc

SEQ ID NO: 632 - DNA, 18 bp, synthetic construct
  source 1..18: mol_type = other DNA
tcatctatactcatccat

SEQ ID NO: 633 - DNA, 18 bp, synthetic construct
  source 1..18: mol_type = other DNA
ttcatctatactcatcca

SEQ ID NO: 634 - DNA, 18 bp, synthetic construct
  source 1..18: mol_type = other DNA
attcatctatactcatcc

SEQ ID NO: 635 - DNA, 18 bp, synthetic construct
  source 1..18: mol_type = other DNA
tcattcatctatactcat

SEQ ID NO: 636 - DNA, 18 bp, synthetic construct
  source 1..18: mol_type = other DNA
atcattcatctatactca

SEQ ID NO: 637 - DNA, 18 bp, synthetic construct
  source 1..18: mol_type = other DNA
catcattcatctatactc

SEQ ID NO: 638 - DNA, 18 bp, synthetic construct
  source 1..18: mol_type = other DNA
ccatcattcatctatact

SEQ ID NO: 639 - DNA, 18 bp, synthetic construct
  source 1..18: mol_type = other DNA
tccatcattcatctatac

SEQ ID NO: 640 - DNA, 18 bp, synthetic construct
  source 1..18: mol_type = other DNA
atccatcattcatctata

SEQ ID NO: 641 - DNA, 18 bp, synthetic construct
  source 1..18: mol_type = other DNA
catccatcattcatctat

SEQ ID NO: 642 - DNA, 18 bp, synthetic construct
  source 1..18: mol_type = other DNA
ccatccatcattcatcta

SEQ ID NO: 643 - DNA, 18 bp, synthetic construct
  source 1..18: mol_type = other DNA
tccatccatcattcatct

SEQ ID NO: 644 - DNA, 18 bp, synthetic construct
  source 1..18: mol_type = other DNA
atccatccatcattcatc

SEQ ID NO: 645 - DNA, 18 bp, synthetic construct
  source 1..18: mol_type = other DNA
tatccatccatcattcat

SEQ ID NO: 646 - DNA, 18 bp, synthetic construct
  source 1..18: mol_type = other DNA
ttatccatccatcattca

SEQ ID NO: 647 - DNA, 18 bp, synthetic construct
  source 1..18: mol_type = other DNA
gttatccatccatcattc

SEQ ID NO: 648 - DNA, 18 bp, synthetic construct
  source 1..18: mol_type = other DNA
aagttatccatccatcat

SEQ ID NO: 649 - DNA, 18 bp, synthetic construct
  source 1..18: mol_type = other DNA
caagttatccatccatca

SEQ ID NO: 650 - DNA, 18 bp, synthetic construct
  source 1..18: mol_type = other DNA
tcaagttatccatccatc

SEQ ID NO: 651 - DNA, 18 bp, synthetic construct
  source 1..18: mol_type = other DNA
atcaagttatccatccat

SEQ ID NO: 652 - DNA, 18 bp, synthetic construct
  source 1..18: mol_type = other DNA
catcaagttatccatcca

SEQ ID NO: 653 - DNA, 18 bp, synthetic construct
  source 1..18: mol_type = other DNA
tcatcaagttatccatcc

SEQ ID NO: 654 - DNA, 18 bp, synthetic construct
  source 1..18: mol_type = other DNA
ctcatcaagttatccatc

SEQ ID NO: 655 - DNA, 18 bp, synthetic construct
  source 1..18: mol_type = other DNA
actcatcaagttatccat

SEQ ID NO: 656 - DNA, 18 bp, synthetic construct
  source 1..18: mol_type = other DNA
cactcatcaagttatcca

SEQ ID NO: 657 - DNA, 18 bp, synthetic construct
  source 1..18: mol_type = other DNA
tccactcatcaagttatc

SEQ ID NO: 658 - DNA, 18 bp, synthetic construct
  source 1..18: mol_type = other DNA
atccactcatcaagttat

SEQ ID NO: 659 - DNA, 18 bp, synthetic construct
  source 1..18: mol_type = other DNA
tatccactcatcaagtta

SEQ ID NO: 660 - DNA, 18 bp, synthetic construct
  source 1..18: mol_type = other DNA
ctatccactcatcaagtt

SEQ ID NO: 661 - DNA, 18 bp, synthetic construct
  source 1..18: mol_type = other DNA
tctatccactcatcaagt

SEQ ID NO: 662 - DNA, 18 bp, synthetic construct
  source 1..18: mol_type = other DNA
atctatccactcatcaag

SEQ ID NO: 663 - DNA, 18 bp, synthetic construct
  source 1..18: mol_type = other DNA
tatctatccactcatcaa

SEQ ID NO: 664 - DNA, 18 bp, synthetic construct
  source 1..18: mol_type = other DNA
ctatctatccactcatca

SEQ ID NO: 665 - DNA, 18 bp, synthetic construct
  source 1..18: mol_type = other DNA
tctatctatccactcatc

SEQ ID NO: 666 - DNA, 18 bp, synthetic construct
  source 1..18: mol_type = other DNA
atctatctatccactcat

SEQ ID NO: 667 - DNA, 18 bp, synthetic construct
  source 1..18: mol_type = other DNA
aatctatctatccactca

SEQ ID NO: 668 - DNA, 18 bp, synthetic construct
  source 1..18: mol_type = other DNA
caatctatctatccactc

SEQ ID NO: 669 - DNA, 18 bp, synthetic construct
  source 1..18: mol_type = other DNA
gcaatctatctatccact

SEQ ID NO: 670 - DNA, 18 bp, synthetic construct
  source 1..18: mol_type = other DNA
agcaatctatctatccac

SEQ ID NO: 671 - DNA, 18 bp, synthetic construct
  source 1..18: mol_type = other DNA
cagcaatctatctatcca

SEQ ID NO: 672 - DNA, 18 bp, synthetic construct
  source 1..18: mol_type = other DNA
ccagcaatctatctatcc

SEQ ID NO: 673 - DNA, 18 bp, synthetic construct
  source 1..18: mol_type = other DNA
tccagcaatctatctatc

SEQ ID NO: 674 - DNA, 18 bp, synthetic construct
  source 1..18: mol_type = other DNA
tatccagcaatctatcta

SEQ ID NO: 675 - DNA, 18 bp, synthetic construct
  source 1..18: mol_type = other DNA
ctatccagcaatctatct

SEQ ID NO: 676 - DNA, 18 bp, synthetic construct
  source 1..18: mol_type = other DNA
tctatccagcaatctatc

SEQ ID NO: 677 - DNA, 18 bp, synthetic construct
  source 1..18: mol_type = other DNA
atctatccagcaatctat

SEQ ID NO: 678 - DNA, 18 bp, synthetic construct
  source 1..18: mol_type = other DNA
catctatccagcaatcta

SEQ ID NO: 679 - DNA, 18 bp, synthetic construct
  source 1..18: mol_type = other DNA
tcatctatccagcaatct

SEQ ID NO: 680 - DNA, 18 bp, synthetic construct
  source 1..18: mol_type = other DNA
atcatctatccagcaatc

SEQ ID NO: 681 - DNA, 18 bp, synthetic construct
  source 1..18: mol_type = other DNA
aatcatctatccagcaat

SEQ ID NO: 682 - DNA, 18 bp, synthetic construct
  source 1..18: mol_type = other DNA
caatcatctatccagcaa

SEQ ID NO: 683 - DNA, 18 bp, synthetic construct
  source 1..18: mol_type = other DNA
tcaatcatctatccagca

SEQ ID NO: 684 - DNA, 18 bp, synthetic construct
  source 1..18: mol_type = other DNA
gtcaatcatctatccagc

SEQ ID NO: 685 - DNA, 18 bp, synthetic construct
  source 1..18: mol_type = other DNA
agtcaatcatctatccag

SEQ ID NO: 686 - DNA, 18 bp, synthetic construct
  source 1..18: mol_type = other DNA
cagtcaatcatctatcca

SEQ ID NO: 687 - DNA, 18 bp, synthetic construct
  source 1..18: mol_type = other DNA
ccagtcaatcatctatcc

SEQ ID NO: 688 - DNA, 18 bp, synthetic construct
  source 1..18: mol_type = other DNA
cccagtcaatcatctatc

SEQ ID NO: 689 - DNA, 18 bp, synthetic construct
  source 1..18: mol_type = other DNA
acccagtcaatcatctat

SEQ ID NO: 690 - DNA, 18 bp, synthetic construct
  source 1..18: mol_type = other DNA
cacccagtcaatcatcta

SEQ ID NO: 691 - DNA, 18 bp, synthetic construct
  source 1..18: mol_type = other DNA
ccacccagtcaatcatct

SEQ ID NO: 692 - DNA, 18 bp, synthetic construct
  source 1..18: mol_type = other DNA
tccacccagtcaatcatc

SEQ ID NO: 693 - DNA, 18 bp, synthetic construct
  source 1..18: mol_type = other DNA
tatccacccagtcaatca

SEQ ID NO: 694 - DNA, 18 bp, synthetic construct
  source 1..18: mol_type = other DNA
ctatccacccagtcaatc

SEQ ID NO: 695 - DNA, 18 bp, synthetic construct
  source 1..18: mol_type = other DNA
tctatccacccagtcaat

SEQ ID NO: 696 - DNA, 18 bp, synthetic construct
  source 1..18: mol_type = other DNA
atctatccacccagtcaa

SEQ ID NO: 697 - DNA, 18 bp, synthetic construct
  source 1..18: mol_type = other DNA
catctatccacccagtca

SEQ ID NO: 698 - DNA, 18 bp, synthetic construct
  source 1..18: mol_type = other DNA
tcatctatccacccagtc

SEQ ID NO: 699 - DNA, 18 bp, synthetic construct
  source 1..18: mol_type = other DNA
ttcatctatccacccagt

SEQ ID NO: 700 - DNA, 18 bp, synthetic construct
  source 1..18: mol_type = other DNA
tttcatctatccacccag

SEQ ID NO: 701 - DNA, 18 bp, synthetic construct
  source 1..18: mol_type = other DNA
atttcatctatccaccca

SEQ ID NO: 702 - DNA, 18 bp, synthetic construct
  source 1..18: mol_type = other DNA
catttcatctatccaccc

SEQ ID NO: 703 - DNA, 18 bp, synthetic construct
  source 1..18: mol_type = other DNA
acatttcatctatccacc

SEQ ID NO: 704 - DNA, 18 bp, synthetic construct
  source 1..18: mol_type = other DNA
aacatttcatctatccac

SEQ ID NO: 705 - DNA, 18 bp, synthetic construct
  source 1..18: mol_type = other DNA
caacatttcatctatcca

SEQ ID NO: 706 - DNA, 18 bp, synthetic construct
  source 1..18: mol_type = other DNA
ccaacatttcatctatcc

SEQ ID NO: 707 - DNA, 18 bp, synthetic construct
  source 1..18: mol_type = other DNA
tccaacatttcatctatc

SEQ ID NO: 708 - DNA, 18 bp, synthetic construct
  source 1..18: mol_type = other DNA
atccaacatttcatctat

SEQ ID NO: 709 - DNA, 18 bp, synthetic construct
  source 1..18: mol_type = other DNA
catccaacatttcatcta

SEQ ID NO: 710 - DNA, 18 bp, synthetic construct
  source 1..18: mol_type = other DNA
tcatccaacatttcatct

SEQ ID NO: 711 - DNA, 18 bp, synthetic construct
  source 1..18: mol_type = other DNA
ctcatccaacatttcatc

SEQ ID NO: 712 - DNA, 18 bp, synthetic construct
  source 1..18: mol_type = other DNA
tgctcatccaacatttca

SEQ ID NO: 713 - DNA, 18 bp, synthetic construct
  source 1..18: mol_type = other DNA
ctgctcatccaacatttc

SEQ ID NO: 714 - DNA, 18 bp, synthetic construct
  source 1..18: mol_type = other DNA
tctgctcatccaacattt

SEQ ID NO: 715 - DNA, 18 bp, synthetic construct
  source 1..18: mol_type = other DNA
atctgctcatccaacatt

SEQ ID NO: 716 - DNA, 18 bp, synthetic construct
  source 1..18: mol_type = other DNA
aatctgctcatccaacat

SEQ ID NO: 717 - DNA, 18 bp, synthetic construct
  source 1..18: mol_type = other DNA
taatctgctcatccaaca

SEQ ID NO: 718 - DNA, 18 bp, synthetic construct
  source 1..18: mol_type = other DNA
ttaatctgctcatccaac

SEQ ID NO: 719 - DNA, 18 bp, synthetic construct
  source 1..18: mol_type = other DNA
cttaatctgctcatccaa

SEQ ID NO: 720 - DNA, 18 bp, synthetic construct
  source 1..18: mol_type = other DNA
acttaatctgctcatcca

SEQ ID NO: 721 - DNA, 18 bp, synthetic construct
  source 1..18: mol_type = other DNA
aacttaatctgctcatcc

SEQ ID NO: 722 - DNA, 18 bp, synthetic construct
  source 1..18: mol_type = other DNA
caacttaatctgctcatc

SEQ ID NO: 723 - DNA, 18 bp, synthetic construct
  source 1..18: mol_type = other DNA
acaacttaatctgctcat

SEQ ID NO: 724 - DNA, 18 bp, synthetic construct
  source 1..18: mol_type = other DNA
tacaacttaatctgctca

SEQ ID NO: 725 - DNA, 18 bp, synthetic construct
  source 1..18: mol_type = other DNA
atacaacttaatctgctc

SEQ ID NO: 726 - DNA, 18 bp, synthetic construct
  source 1..18: mol_type = other DNA
aatacaacttaatctgct

SEQ ID NO: 727 - DNA, 18 bp, synthetic construct
  source 1..18: mol_type = other DNA
caatacaacttaatctgc

SEQ ID NO: 728 - DNA, 18 bp, synthetic construct
  source 1..18: mol_type = other DNA
tccaatacaacttaatct

SEQ ID NO: 729 - DNA, 18 bp, synthetic construct
  source 1..18: mol_type = other DNA
atccaatacaacttaatc

SEQ ID NO: 730 - DNA, 18 bp, synthetic construct
  source 1..18: mol_type = other DNA
catccaatacaacttaat

SEQ ID NO: 731 - DNA, 18 bp, synthetic construct
  source 1..18: mol_type = other DNA
ccatccaatacaacttaa

SEQ ID NO: 732 - DNA, 18 bp, synthetic construct
  source 1..18: mol_type = other DNA
cccatccaatacaactta

SEQ ID NO: 733 - DNA, 18 bp, synthetic construct
  source 1..18: mol_type = other DNA
tcccatccaatacaactt

SEQ ID NO: 734 - DNA, 18 bp, synthetic construct
  source 1..18: mol_type = other DNA
atcccatccaatacaact

SEQ ID NO: 735 - DNA, 18 bp, synthetic construct
  source 1..18: mol_type = other DNA
catcccatccaatacaac

SEQ ID NO: 736 - DNA, 18 bp, synthetic construct
  source 1..18: mol_type = other DNA
ccatcccatccaatacaa

SEQ ID NO: 737 - DNA, 18 bp, synthetic construct
  source 1..18: mol_type = other DNA
tccatcccatccaataca

SEQ ID NO: 738 - DNA, 18 bp, synthetic construct
  source 1..18: mol_type = other DNA
atccatcccatccaatac

SEQ ID NO: 739 - DNA, 18 bp, synthetic construct
  source 1..18: mol_type = other DNA
catccatcccatccaata

SEQ ID NO: 740 - DNA, 18 bp, synthetic construct
  source 1..18: mol_type = other DNA
ccatccatcccatccaat

SEQ ID NO: 741 - DNA, 18 bp, synthetic construct
  source 1..18: mol_type = other DNA
tccatccatcccatccaa

SEQ ID NO: 742 - DNA, 18 bp, synthetic construct
  source 1..18: mol_type = other DNA
ttccatccatcccatcca

SEQ ID NO: 743 - DNA, 18 bp, synthetic construct
  source 1..18: mol_type = other DNA
cttccatccatcccatcc

SEQ ID NO: 744 - DNA, 18 bp, synthetic construct
  source 1..18: mol_type = other DNA
acttccatccatcccatc

SEQ ID NO: 745 - DNA, 18 bp, synthetic construct
  source 1..18: mol_type = other DNA
cacttccatccatcccat

SEQ ID NO: 746 - DNA, 18 bp, synthetic construct
  source 1..18: mol_type = other DNA
cacacttccatccatccc

SEQ ID NO: 747 - DNA, 18 bp, synthetic construct
  source 1..18: mol_type = other DNA
ccacacttccatccatcc

SEQ ID NO: 748 - DNA, 18 bp, synthetic construct
  source 1..18: mol_type = other DNA
accacacttccatccatc

SEQ ID NO: 749 - DNA, 18 bp, synthetic construct
  source 1..18: mol_type = other DNA
aaccacacttccatccat

SEQ ID NO: 750 - DNA, 18 bp, synthetic construct
  source 1..18: mol_type = other DNA
caaccacacttccatcca

SEQ ID NO: 751 - DNA, 18 bp, synthetic construct
  source 1..18: mol_type = other DNA
tcaaccacacttccatcc

SEQ ID NO: 752 - DNA, 18 bp, synthetic construct
  source 1..18: mol_type = other DNA
ctcaaccacacttccatc

SEQ ID NO: 753 - DNA, 18 bp, synthetic construct
  source 1..18: mol_type = other DNA
actcaaccacacttccat

SEQ ID NO: 754 - DNA, 18 bp, synthetic construct
  source 1..18: mol_type = other DNA
aactcaaccacacttcca

SEQ ID NO: 755 - DNA, 18 bp, synthetic construct
  source 1..18: mol_type = other DNA
taactcaaccacacttcc

SEQ ID NO: 756 - DNA, 18 bp, synthetic construct
  source 1..18: mol_type = other DNA
ataactcaaccacacttc

SEQ ID NO: 757 - DNA, 18 bp, synthetic construct
  source 1..18: mol_type = other DNA
aataactcaaccacactt

SEQ ID NO: 758 - DNA, 18 bp, synthetic construct
  source 1..18: mol_type = other DNA
taataactcaaccacact

SEQ ID NO: 759 - DNA, 18 bp, synthetic construct
  source 1..18: mol_type = other DNA
ctaataactcaaccacac

SEQ ID NO: 760 - DNA, 18 bp, synthetic construct
  source 1..18: mol_type = other DNA
tctaataactcaaccaca

SEQ ID NO: 761 - DNA, 18 bp, synthetic construct
  source 1..18: mol_type = other DNA
ttctaataactcaaccac

SEQ ID NO: 762 - DNA, 18 bp, synthetic construct
  source 1..18: mol_type = other DNA
cttctaataactcaacca

SEQ ID NO: 763 - DNA, 18 bp, synthetic construct
  source 1..18: mol_type = other DNA
ccttctaataactcaacc

SEQ ID NO: 764 - DNA, 18 bp, synthetic construct
  source 1..18: mol_type = other DNA
tccttctaataactcaac

SEQ ID NO: 765 - DNA, 18 bp, synthetic construct
  source 1..18: mol_type = other DNA
cttccttctaataactca

SEQ ID NO: 766 - DNA, 18 bp, synthetic construct
  source 1..18: mol_type = other DNA
tcttccttctaataactc

SEQ ID NO: 767 - DNA, 18 bp, synthetic construct
  source 1..18: mol_type = other DNA
atcttccttctaataact

SEQ ID NO: 768 - DNA, 18 bp, synthetic construct
  source 1..18: mol_type = other DNA
aatcttccttctaataac

SEQ ID NO: 769 - DNA, 18 bp, synthetic construct
  source 1..18: mol_type = other DNA
caatcttccttctaataa

SEQ ID NO: 770 - DNA, 18 bp, synthetic construct
  source 1..18: mol_type = other DNA
tcaatcttccttctaata

SEQ ID NO: 771 - DNA, 18 bp, synthetic construct
  source 1..18: mol_type = other DNA
ctcaatcttccttctaat

SEQ ID NO: 772 - DNA, 18 bp, synthetic construct
  source 1..18: mol_type = other DNA
actcaatcttccttctaa

SEQ ID NO: 773 - DNA, 18 bp, synthetic construct
  source 1..18: mol_type = other DNA
tactcaatcttccttcta

SEQ ID NO: 774 - DNA, 18 bp, synthetic construct
  source 1..18: mol_type = other DNA
ctactcaatcttccttct

SEQ ID NO: 775 - DNA, 18 bp, synthetic construct
  source 1..18: mol_type = other DNA
tctactcaatcttccttc

SEQ ID NO: 776 - DNA, 18 bp, synthetic construct
  source 1..18: mol_type = other DNA
atctactcaatcttcctt

SEQ ID NO: 777 - DNA, 18 bp, synthetic construct
  source 1..18: mol_type = other DNA
tatctactcaatcttcct

SEQ ID NO: 778 - DNA, 18 bp, synthetic construct
  source 1..18: mol_type = other DNA
ctatctactcaatcttcc

SEQ ID NO: 779 - DNA, 18 bp, synthetic construct
  source 1..18: mol_type = other DNA
cctatctactcaatcttc

SEQ ID NO: 780 - DNA, 18 bp, synthetic construct
  source 1..18: mol_type = other DNA
acctatctactcaatctt

SEQ ID NO: 781 - DNA, 18 bp, synthetic construct
  source 1..18: mol_type = other DNA
tcacctatctactcaatc

SEQ ID NO: 782 - DNA, 18 bp, synthetic construct
  source 1..18: mol_type = other DNA
ttcacctatctactcaat

SEQ ID NO: 783 - DNA, 18 bp, synthetic construct
  source 1..18: mol_type = other DNA
attcacctatctactcaa

SEQ ID NO: 784 - DNA, 18 bp, synthetic construct
  source 1..18: mol_type = other DNA
aattcacctatctactca

SEQ ID NO: 785 - DNA, 18 bp, synthetic construct
  source 1..18: mol_type = other DNA
aaattcacctatctactc

SEQ ID NO: 786 - DNA, 18 bp, synthetic construct
  source 1..18: mol_type = other DNA
caaattcacctatctact

SEQ ID NO: 787 - DNA, 18 bp, synthetic construct
  source 1..18: mol_type = other DNA
acaaattcacctatctac

SEQ ID NO: 788 - DNA, 18 bp, synthetic construct
  source 1..18: mol_type = other DNA
aacaaattcacctatcta

SEQ ID NO: 789 - DNA, 18 bp, synthetic construct
  source 1..18: mol_type = other DNA
caacaaattcacctatct

SEQ ID NO: 790 - DNA, 18 bp, synthetic construct
  source 1..18: mol_type = other DNA
tcaacaaattcacctatc

SEQ ID NO: 791 - DNA, 18 bp, synthetic construct
  source 1..18: mol_type = other DNA
atcaacaaattcacctat

SEQ ID NO: 792 - DNA, 18 bp, synthetic construct
  source 1..18: mol_type = other DNA
tatcaacaaattcaccta

SEQ ID NO: 793 - DNA, 18 bp, synthetic construct
  source 1..18: mol_type = other DNA
ctatcaacaaattcacct

SEQ ID NO: 794 - DNA, 18 bp, synthetic construct
  source 1..18: mol_type = other DNA
actatcaacaaattcacc

SEQ ID NO: 795 - DNA, 18 bp, synthetic construct
  source 1..18: mol_type = other DNA
gactatcaacaaattcac

SEQ ID NO: 796 - DNA, 18 bp, synthetic construct
  source 1..18: mol_type = other DNA
tgactatcaacaaattca

SEQ ID NO: 797 - DNA, 18 bp, synthetic construct
  source 1..18: mol_type = other DNA
ctgactatcaacaaattc

SEQ ID NO: 798 - DNA, 18 bp, synthetic construct
  source 1..18: mol_type = other DNA
tctgactatcaacaaatt

SEQ ID NO: 799 - DNA, 18 bp, synthetic construct
  source 1..18: mol_type = other DNA
atctgactatcaacaaat

SEQ ID NO: 800 - DNA, 18 bp, synthetic construct
  source 1..18: mol_type = other DNA
ccatctgactatcaacaa

SEQ ID NO: 801 - DNA, 18 bp, synthetic construct
  source 1..18: mol_type = other DNA
cccatctgactatcaaca

SEQ ID NO: 802 - DNA, 18 bp, synthetic construct
  source 1..18: mol_type = other DNA
acccatctgactatcaac

SEQ ID NO: 803 - DNA, 18 bp, synthetic construct
  source 1..18: mol_type = other DNA
tacccatctgactatcaa

SEQ ID NO: 804 - DNA, 18 bp, synthetic construct
  source 1..18: mol_type = other DNA
ctacccatctgactatca

SEQ ID NO: 805 - DNA, 18 bp, synthetic construct
  source 1..18: mol_type = other DNA
tctacccatctgactatc

SEQ ID NO: 806 - DNA, 18 bp, synthetic construct
  source 1..18: mol_type = other DNA
atctacccatctgactat

SEQ ID NO: 807 - DNA, 18 bp, synthetic construct
  source 1..18: mol_type = other DNA
tatctacccatctgacta

SEQ ID NO: 808 - DNA, 18 bp, synthetic construct
  source 1..18: mol_type = other DNA
ctatctacccatctgact

SEQ ID NO: 809 - DNA, 18 bp, synthetic construct
  source 1..18: mol_type = other DNA
cctatctacccatctgac

SEQ ID NO: 810 - DNA, 18 bp, synthetic construct
  source 1..18: mol_type = other DNA
acctatctacccatctga

SEQ ID NO: 811 - DNA, 18 bp, synthetic construct
  source 1..18: mol_type = other DNA
tacctatctacccatctg

SEQ ID NO: 812 - DNA, 18 bp, synthetic construct
  source 1..18: mol_type = other DNA
ctacctatctacccatct

SEQ ID NO: 813 - DNA, 18 bp, synthetic construct
  source 1..18: mol_type = other DNA
tctacctatctacccatc

SEQ ID NO: 814 - DNA, 18 bp, synthetic construct
  source 1..18: mol_type = other DNA
atctacctatctacccat

SEQ ID NO: 815 - DNA, 18 bp, synthetic construct
  source 1..18: mol_type = other DNA
catctacctatctaccca

SEQ ID NO: 816 - DNA, 18 bp, synthetic construct
  source 1..18: mol_type = other DNA
tccatctacctatctacc

SEQ ID NO: 817 - DNA, 18 bp, synthetic construct
  source 1..18: mol_type = other DNA
atccatctacctatctac

SEQ ID NO: 818 - DNA, 18 bp, synthetic construct
  source 1..18: mol_type = other DNA
catccatctacctatcta

SEQ ID NO: 819 - DNA, 18 bp, synthetic construct
  source 1..18: mol_type = other DNA
ccatccatctacctatct

SEQ ID NO: 820 - DNA, 18 bp, synthetic construct
  source 1..18: mol_type = other DNA
tccatccatctacctatc

SEQ ID NO: 821 - DNA, 18 bp, synthetic construct
  source 1..18: mol_type = other DNA
atccatccatctacctat

SEQ ID NO: 822 - DNA, 18 bp, synthetic construct
  source 1..18: mol_type = other DNA
catccatccatctaccta

SEQ ID NO: 823 - DNA, 18 bp, synthetic construct
  source 1..18: mol_type = other DNA
ccatccatccatctacct

SEQ ID NO: 824 - DNA, 18 bp, synthetic construct
  source 1..18: mol_type = other DNA
tccatccatccatctacc

SEQ ID NO: 825 - DNA, 18 bp, synthetic construct
  source 1..18: mol_type = other DNA
atccatccatccatctac

SEQ ID NO: 826 - DNA, 18 bp, synthetic construct
  source 1..18: mol_type = other DNA
catccatccatccatcta

SEQ ID NO: 827 - DNA, 18 bp, synthetic construct
  source 1..18: mol_type = other DNA
ccatccatccatccatct

SEQ ID NO: 828 - DNA, 18 bp, synthetic construct
  source 1..18: mol_type = other DNA
tccatccatccatccatc

SEQ ID NO: 829 - DNA, 18 bp, synthetic construct
  source 1..18: mol_type = other DNA
atccatccatccatccat

SEQ ID NO: 830 - DNA, 18 bp, synthetic construct
  source 1..18: mol_type = other DNA
catccatccatccatcca

SEQ ID NO: 831 - DNA, 18 bp, synthetic construct
  source 1..18: mol_type = other DNA
tccatccatccatccatc

SEQ ID NO: 832 - DNA, 18 bp, synthetic construct
  source 1..18: mol_type = other DNA
atccatccatccatccat

SEQ ID NO: 833 - DNA, 18 bp, synthetic construct
  source 1..18: mol_type = other DNA
catccatccatccatcca

SEQ ID NO: 834 - DNA, 18 bp, synthetic construct
  source 1..18: mol_type = other DNA
acatccatccatccatcc

SEQ ID NO: 835 - DNA, 18 bp, synthetic construct
  source 1..18: mol_type = other DNA
tacatccatccatccatc

SEQ ID NO: 836 - DNA, 18 bp, synthetic construct
  source 1..18: mol_type = other DNA
atacatccatccatccat

SEQ ID NO: 837 - DNA, 18 bp, synthetic construct
  source 1..18: mol_type = other DNA
tatacatccatccatcca

SEQ ID NO: 838 - DNA, 18 bp, synthetic construct
  source 1..18: mol_type = other DNA
ctatacatccatccatcc

SEQ ID NO: 839 - DNA, 18 bp, synthetic construct
  source 1..18: mol_type = other DNA
cctatacatccatccatc

SEQ ID NO: 840 - DNA, 18 bp, synthetic construct
  source 1..18: mol_type = other DNA
gcctatacatccatccat

SEQ ID NO: 841 - DNA, 18 bp, synthetic construct
  source 1..18: mol_type = other DNA
tgcctatacatccatcca

SEQ ID NO: 842 - DNA, 18 bp, synthetic construct
  source 1..18: mol_type = other DNA
ctgcctatacatccatcc

SEQ ID NO: 843 - DNA, 18 bp, synthetic construct
  source 1..18: mol_type = other DNA
tctgcctatacatccatc

SEQ ID NO: 844 - DNA, 18 bp, synthetic construct
  source 1..18: mol_type = other DNA
atctgcctatacatccat

SEQ ID NO: 845 - DNA, 18 bp, synthetic construct
  source 1..18: mol_type = other DNA
catctgcctatacatcca

SEQ ID NO: 846 - DNA, 18 bp, synthetic construct
  source 1..18: mol_type = other DNA
ccatctgcctatacatcc

SEQ ID NO: 847 - DNA, 18 bp, synthetic construct
  source 1..18: mol_type = other DNA
tccatctgcctatacatc

SEQ ID NO: 848 - DNA, 18 bp, synthetic construct
  source 1..18: mol_type = other DNA
tgtccatctgcctataca

SEQ ID NO: 849 - DNA, 18 bp, synthetic construct
  source 1..18: mol_type = other DNA
ttgtccatctgcctatac

SEQ ID NO: 850 - DNA, 18 bp, synthetic construct
  source 1..18: mol_type = other DNA
tttgtccatctgcctata

SEQ ID NO: 851 - DNA, 18 bp, synthetic construct
  source 1..18: mol_type = other DNA
atttgtccatctgcctat

SEQ ID NO: 852 - DNA, 18 bp, synthetic construct
  source 1..18: mol_type = other DNA
catttgtccatctgccta

SEQ ID NO: 853 - DNA, 18 bp, synthetic construct
  source 1..18: mol_type = other DNA
ccatttgtccatctgcct

SEQ ID NO: 854 - DNA, 18 bp, synthetic construct
  source 1..18: mol_type = other DNA
tccatttgtccatctgcc

SEQ ID NO: 855 - DNA, 18 bp, synthetic construct
  source 1..18: mol_type = other DNA
atccatttgtccatctgc

SEQ ID NO: 856 - DNA, 18 bp, synthetic construct
  source 1..18: mol_type = other DNA
catccatttgtccatctg

SEQ ID NO: 857 - DNA, 18 bp, synthetic construct
  source 1..18: mol_type = other DNA
tcatccatttgtccatct

SEQ ID NO: 858 - DNA, 18 bp, synthetic construct
  source 1..18: mol_type = other DNA
ttcatccatttgtccatc

SEQ ID NO: 859 - DNA, 18 bp, synthetic construct
  source 1..18: mol_type = other DNA
attcatccatttgtccat

SEQ ID NO: 860 - DNA, 18 bp, synthetic construct
  source 1..18: mol_type = other DNA
cattcatccatttgtcca

SEQ ID NO: 861 - DNA, 18 bp, synthetic construct
  source 1..18: mol_type = other DNA
ccattcatccatttgtcc

SEQ ID NO: 862 - DNA, 18 bp, synthetic construct
  source 1..18: mol_type = other DNA
cccattcatccatttgtc

SEQ ID NO: 863 - DNA, 18 bp, synthetic construct
  source 1..18: mol_type = other DNA
acccattcatccatttgt

SEQ ID NO: 864 - DNA, 18 bp, synthetic construct
  source 1..18: mol_type = other DNA
cacccattcatccatttg

SEQ ID NO: 865 - DNA, 18 bp, synthetic construct
  source 1..18: mol_type = other DNA
ccacccattcatccattt

SEQ ID NO: 866 - DNA, 18 bp, synthetic construct
  source 1..18: mol_type = other DNA
cccacccattcatccatt

SEQ ID NO: 867 - DNA, 18 bp, synthetic construct
  source 1..18: mol_type = other DNA
cacccacccattcatcca

SEQ ID NO: 868 - DNA, 18 bp, synthetic construct
  source 1..18: mol_type = other DNA
ccacccacccattcatcc

SEQ ID NO: 869 - DNA, 18 bp, synthetic construct
  source 1..18: mol_type = other DNA
tccacccacccattcatc

SEQ ID NO: 870 - DNA, 18 bp, synthetic construct
  source 1..18: mol_type = other DNA
atccacccacccattcat

SEQ ID NO: 871 - DNA, 18 bp, synthetic construct
  source 1..18: mol_type = other DNA
catccacccacccattca

SEQ ID NO: 872 - DNA, 18 bp, synthetic construct
  source 1..18: mol_type = other DNA
tcatccacccacccattc

SEQ ID NO: 873 - DNA, 18 bp, synthetic construct
  source 1..18: mol_type = other DNA
ttcatccacccacccatt

SEQ ID NO: 874 - DNA, 18 bp, synthetic construct
  source 1..18: mol_type = other DNA
attcatccacccacccat

SEQ ID NO: 875 - DNA, 18 bp, synthetic construct
  source 1..18: mol_type = other DNA
cattcatccacccaccca

SEQ ID NO: 876 - DNA, 18 bp, synthetic construct
  source 1..18: mol_type = other DNA
ccattcatccacccaccc

SEQ ID NO: 877 - DNA, 18 bp, synthetic construct
  source 1..18: mol_type = other DNA
tccattcatccacccacc

SEQ ID NO: 878 - DNA, 18 bp, synthetic construct
  source 1..18: mol_type = other DNA
ttccattcatccacccac

SEQ ID NO: 879 - DNA, 18 bp, synthetic construct
  source 1..18: mol_type = other DNA
cttccattcatccaccca

SEQ ID NO: 880 - DNA, 18 bp, synthetic construct
  source 1..18: mol_type = other DNA
ccttccattcatccaccc

SEQ ID NO: 881 - DNA, 18 bp, synthetic construct
  source 1..18: mol_type = other DNA
tccttccattcatccacc

SEQ ID NO: 882 - DNA, 18 bp, synthetic construct
  source 1..18: mol_type = other DNA
atccttccattcatccac

SEQ ID NO: 883 - DNA, 18 bp, synthetic construct
  source 1..18: mol_type = other DNA
catccttccattcatcca

SEQ ID NO: 884 - DNA, 18 bp, synthetic construct
  source 1..18: mol_type = other DNA
acatccttccattcatcc

SEQ ID NO: 885 - DNA, 18 bp, synthetic construct
  source 1..18: mol_type = other DNA
cacatccttccattcatc

SEQ ID NO: 886 - DNA, 18 bp, synthetic construct
  source 1..18: mol_type = other DNA
cacacatccttccattca

SEQ ID NO: 887 - DNA, 18 bp, synthetic construct
  source 1..18: mol_type = other DNA
ccacacatccttccattc

SEQ ID NO: 888 - DNA, 18 bp, synthetic construct
  source 1..18: mol_type = other DNA
accacacatccttccatt

SEQ ID NO: 889 - DNA, 18 bp, synthetic construct
  source 1..18: mol_type = other DNA
aaccacacatccttccat

SEQ ID NO: 890 - DNA, 18 bp, synthetic construct
  source 1..18: mol_type = other DNA
caaccacacatccttcca

SEQ ID NO: 891 - DNA, 18 bp, synthetic construct
  source 1..18: mol_type = other DNA
tcaaccacacatccttcc

SEQ ID NO: 892 - DNA, 18 bp, synthetic construct
  source 1..18: mol_type = other DNA
ttcaaccacacatccttc

SEQ ID NO: 893 - DNA, 18 bp, synthetic construct
  source 1..18: mol_type = other DNA
gttcaaccacacatcctt

SEQ ID NO: 894 - DNA, 18 bp, synthetic construct
  source 1..18: mol_type = other DNA
agttcaaccacacatcct

SEQ ID NO: 895 - DNA, 18 bp, synthetic construct
  source 1..18: mol_type = other DNA
tagttcaaccacacatcc

SEQ ID NO: 896 - DNA, 18 bp, synthetic construct
  source 1..18: mol_type = other DNA
atagttcaaccacacatc

SEQ ID NO: 897 - DNA, 18 bp, synthetic construct
  source 1..18: mol_type = other DNA
aatagttcaaccacacat

SEQ ID NO: 898 - DNA, 18 bp, synthetic construct
  source 1..18: mol_type = other DNA
caatagttcaaccacaca

SEQ ID NO: 899 - DNA, 18 bp, synthetic construct
  source 1..18: mol_type = other DNA
gcaatagttcaaccacac

SEQ ID NO: 900 - DNA, 18 bp, synthetic construct
  source 1..18: mol_type = other DNA
tgcaatagttcaaccaca

SEQ ID NO: 901 - DNA, 18 bp, synthetic construct
  source 1..18: mol_type = other DNA
ttgcaatagttcaaccac

SEQ ID NO: 902 - DNA, 18 bp, synthetic construct
  source 1..18: mol_type = other DNA
acttgcaatagttcaacc

SEQ ID NO: 903 - DNA, 18 bp, synthetic construct
  source 1..18: mol_type = other DNA
tacttgcaatagttcaac

SEQ ID NO: 904 - DNA, 18 bp, synthetic construct
  source 1..18: mol_type = other DNA
atacttgcaatagttcaa

SEQ ID NO: 905 - DNA, 18 bp, synthetic construct
  source 1..18: mol_type = other DNA
aatacttgcaatagttca

SEQ ID NO: 906 - DNA, 18 bp, synthetic construct
  source 1..18: mol_type = other DNA
caatacttgcaatagttc

SEQ ID NO: 907 - DNA, 18 bp, synthetic construct
  source 1..18: mol_type = other DNA
tcaatacttgcaatagtt

SEQ ID NO: 908 - DNA, 18 bp, synthetic construct
  source 1..18: mol_type = other DNA
atcaatacttgcaatagt

SEQ ID NO: 909 - DNA, 18 bp, synthetic construct
  source 1..18: mol_type = other DNA
tatcaatacttgcaatag

SEQ ID NO: 910 - DNA, 18 bp, synthetic construct
  source 1..18: mol_type = other DNA
ttatcaatacttgcaata

SEQ ID NO: 911 - DNA, 18 bp, synthetic construct
  source 1..18: mol_type = other DNA
attatcaatacttgcaat

SEQ ID NO: 912 - DNA, 18 bp, synthetic construct
  source 1..18: mol_type = other DNA
aattatcaatacttgcaa

SEQ ID NO: 913 - DNA, 18 bp, synthetic construct
  source 1..18: mol_type = other DNA
caattatcaatacttgca

SEQ ID NO: 914 - DNA, 18 bp, synthetic construct
  source 1..18: mol_type = other DNA
ccaattatcaatacttgc

SEQ ID NO: 915 - DNA, 18 bp, synthetic construct
  source 1..18: mol_type = other DNA
acccaattatcaatactt

SEQ ID NO: 916 - DNA, 18 bp, synthetic construct
  source 1..18: mol_type = other DNA
aacccaattatcaatact

SEQ ID NO: 917 - DNA, 18 bp, synthetic construct
  source 1..18: mol_type = other DNA
gaacccaattatcaatac

SEQ ID NO: 918 - DNA, 18 bp, synthetic construct
  source 1..18: mol_type = other DNA
tgaacccaattatcaata

SEQ ID NO: 919 - DNA, 18 bp, synthetic construct
  source 1..18: mol_type = other DNA
atgaacccaattatcaat

SEQ ID NO: 920 - DNA, 18 bp, synthetic construct
  source 1..18: mol_type = other DNA
tatgaacccaattatcaa

SEQ ID NO: 921 - DNA, 18 bp, synthetic construct
  source 1..18: mol_type = other DNA
ttatgaacccaattatca

SEQ ID NO: 922 - DNA, 18 bp, synthetic construct
  source 1..18: mol_type = other DNA
attatgaacccaattatc

SEQ ID NO: 923 - DNA, 18 bp, synthetic construct
  source 1..18: mol_type = other DNA
aattatgaacccaattat

SEQ ID NO: 924 - DNA, 18 bp, synthetic construct
  source 1..18: mol_type = other DNA
aaattatgaacccaatta

SEQ ID NO: 925 - DNA, 18 bp, synthetic construct
  source 1..18: mol_type = other DNA
gaaattatgaacccaatt

SEQ ID NO: 926 - DNA, 18 bp, synthetic construct
  source 1..18: mol_type = other DNA
agaaattatgaacccaat

SEQ ID NO: 927 - DNA, 18 bp, synthetic construct
  source 1..18: mol_type = other DNA
cagaaattatgaacccaa

SEQ ID NO: 928 - DNA, 18 bp, synthetic construct
  source 1..18: mol_type = other DNA
ttcagaaattatgaaccc

SEQ ID NO: 929 - DNA, 18 bp, synthetic construct
  source 1..18: mol_type = other DNA
attcagaaattatgaacc

SEQ ID NO: 930 - DNA, 18 bp, synthetic construct
  source 1..18: mol_type = other DNA
tattcagaaattatgaac

SEQ ID NO: 931 - DNA, 18 bp, synthetic construct
  source 1..18: mol_type = other DNA
atattcagaaattatgaa

SEQ ID NO: 932 - DNA, 18 bp, synthetic construct
  source 1..18: mol_type = other DNA
aatattcagaaattatga

SEQ ID NO: 933 - DNA, 18 bp, synthetic construct
  source 1..18: mol_type = other DNA
aaatattcagaaattatg

SEQ ID NO: 934 - DNA, 18 bp, synthetic construct
  source 1..18: mol_type = other DNA
taaatattcagaaattat

SEQ ID NO: 935 - DNA, 18 bp, synthetic construct
  source 1..18: mol_type = other DNA
ctaaatattcagaaatta

SEQ ID NO: 936 - DNA, 18 bp, synthetic construct
  source 1..18: mol_type = other DNA
tctaaatattcagaaatt

SEQ ID NO: 937 - DNA, 18 bp, synthetic construct
  source 1..18: mol_type = other DNA
atctaaatattcagaaat

SEQ ID NO: 938 - DNA, 18 bp, synthetic construct
  source 1..18: mol_type = other DNA
catctaaatattcagaaa

SEQ ID NO: 939 - DNA, 18 bp, synthetic construct
  source 1..18: mol_type = other DNA
ccatctaaatattcagaa

SEQ ID NO: 940 - DNA, 18 bp, synthetic construct
  source 1..18: mol_type = other DNA
tccatctaaatattcaga

SEQ ID NO: 941 - DNA, 18 bp, synthetic construct
  source 1..18: mol_type = other DNA
atccatctaaatattcag

SEQ ID NO: 942 - DNA, 18 bp, synthetic construct
  source 1..18: mol_type = other DNA
catccatctaaatattca

SEQ ID NO: 943 - DNA, 18 bp, synthetic construct
  source 1..18: mol_type = other DNA
accatccatctaaatatt

SEQ ID NO: 944 - DNA, 18 bp, synthetic construct
  source 1..18: mol_type = other DNA
aaccatccatctaaatat

SEQ ID NO: 945 - DNA, 18 bp, synthetic construct
  source 1..18: mol_type = other DNA
caaccatccatctaaata

SEQ ID NO: 946 - DNA, 18 bp, synthetic construct
  source 1..18: mol_type = other DNA
acaaccatccatctaaat

SEQ ID NO: 947 - DNA, 18 bp, synthetic construct
  source 1..18: mol_type = other DNA
cacaaccatccatctaaa

SEQ ID NO: 948 - DNA, 18 bp, synthetic construct
  source 1..18: mol_type = other DNA
tcacaaccatccatctaa

SEQ ID NO: 949 - DNA, 18 bp, synthetic construct
  source 1..18: mol_type = other DNA
ctcacaaccatccatcta

SEQ ID NO: 950 - DNA, 18 bp, synthetic construct
  source 1..18: mol_type = other DNA
actcacaaccatccatct

SEQ ID NO: 951 - DNA, 18 bp, synthetic construct
  source 1..18: mol_type = other DNA
cactcacaaccatccatc

SEQ ID NO: 952 - DNA, 18 bp, synthetic construct
  source 1..18: mol_type = other DNA
ccactcacaaccatccat

SEQ ID NO: 953 - DNA, 18 bp, synthetic construct
  source 1..18: mol_type = other DNA
gccactcacaaccatcca

SEQ ID NO: 954 - DNA, 18 bp, synthetic construct
  source 1..18: mol_type = other DNA
agccactcacaaccatcc

SEQ ID NO: 955 - DNA, 18 bp, synthetic construct
  source 1..18: mol_type = other DNA
cagccactcacaaccatc

SEQ ID NO: 956 - DNA, 18 bp, synthetic construct
  source 1..18: mol_type = other DNA
ccagccactcacaaccat

SEQ ID NO: 957 - DNA, 18 bp, synthetic construct
  source 1..18: mol_type = other DNA
accagccactcacaacca

SEQ ID NO: 958 - DNA, 18 bp, synthetic construct
  source 1..18: mol_type = other DNA
caccagccactcacaacc

SEQ ID NO: 959 - DNA, 18 bp, synthetic construct
  source 1..18: mol_type = other DNA
ccaccagccactcacaac

SEQ ID NO: 960 - DNA, 18 bp, synthetic construct
  source 1..18: mol_type = other DNA
tccaccagccactcacaa

SEQ ID NO: 961 - DNA, 18 bp, synthetic construct
  source 1..18: mol_type = other DNA
gtccaccagccactcaca

SEQ ID NO: 962 - DNA, 18 bp, synthetic construct
  source 1..18: mol_type = other DNA
ctgtccaccagccactca

SEQ ID NO: 963 - DNA, 18 bp, synthetic construct
  source 1..18: mol_type = other DNA
tctgtccaccagccactc

SEQ ID NO: 964 - DNA, 18 bp, synthetic construct
  source 1..18: mol_type = other DNA
gtctgtccaccagccact

SEQ ID NO: 965 - DNA, 18 bp, synthetic construct
  source 1..18: mol_type = other DNA
cgtctgtccaccagccac

SEQ ID NO: 966 - DNA, 18 bp, synthetic construct
  source 1..18: mol_type = other DNA
tcgtctgtccaccagcca

SEQ ID NO: 967 - DNA, 18 bp, synthetic construct
  source 1..18: mol_type = other DNA
ttcgtctgtccaccagcc

SEQ ID NO: 968 - DNA, 18 bp, synthetic construct
  source 1..18: mol_type = other DNA
tttcgtctgtccaccagc

SEQ ID NO: 969 - DNA, 18 bp, synthetic construct
  source 1..18: mol_type = other DNA
ttttcgtctgtccaccag

SEQ ID NO: 970 - DNA, 18 bp, synthetic construct
  source 1..18: mol_type = other DNA
tttttcgtctgtccacca

SEQ ID NO: 971 - DNA, 18 bp, synthetic construct
  source 1..18: mol_type = other DNA
atttttcgtctgtccacc

SEQ ID NO: 972 - DNA, 18 bp, synthetic construct
  source 1..18: mol_type = other DNA
catttttcgtctgtccac

SEQ ID NO: 973 - DNA, 18 bp, synthetic construct
  source 1..18: mol_type = other DNA
ccatttttcgtctgtcca

SEQ ID NO: 974 - DNA, 18 bp, synthetic construct
  source 1..18: mol_type = other DNA
tccatttttcgtctgtcc

SEQ ID NO: 975 - DNA, 18 bp, synthetic construct
  source 1..18: mol_type = other DNA
atccatttttcgtctgtc

SEQ ID NO: 976 - DNA, 18 bp, synthetic construct
  source 1..18: mol_type = other DNA
catccatttttcgtctgt

SEQ ID NO: 977 - DNA, 18 bp, synthetic construct
  source 1..18: mol_type = other DNA
ccatccatttttcgtctg

SEQ ID NO: 978 - DNA, 18 bp, synthetic construct
  source 1..18: mol_type = other DNA
accatccatttttcgtct

SEQ ID NO: 979 - DNA, 18 bp, synthetic construct
  source 1..18: mol_type = other DNA
aaccatccatttttcgtc

SEQ ID NO: 980 - DNA, 18 bp, synthetic construct
  source 1..18: mol_type = other DNA
caaccatccatttttcgt

SEQ ID NO: 981 - DNA, 18 bp, synthetic construct
  source 1..18: mol_type = other DNA
tccaaccatccatttttc

SEQ ID NO: 982 - DNA, 18 bp, synthetic construct
  source 1..18: mol_type = other DNA
atccaaccatccattttt

SEQ ID NO: 983 - DNA, 18 bp, synthetic construct
  source 1..18: mol_type = other DNA
tatccaaccatccatttt

SEQ ID NO: 984 - DNA, 18 bp, synthetic construct
  source 1..18: mol_type = other DNA
ttatccaaccatccattt

SEQ ID NO: 985 - DNA, 18 bp, synthetic construct
  source 1..18: mol_type = other DNA
tttatccaaccatccatt

SEQ ID NO: 986 - DNA, 18 bp, synthetic construct
  source 1..18: mol_type = other DNA
atttatccaaccatccat

SEQ ID NO: 987 - DNA, 18 bp, synthetic construct
  source 1..18: mol_type = other DNA
aatttatccaaccatcca

SEQ ID NO: 988 - DNA, 18 bp, synthetic construct
  source 1..18: mol_type = other DNA
caatttatccaaccatcc

SEQ ID NO: 989 - DNA, 18 bp, synthetic construct
  source 1..18: mol_type = other DNA
tcaatttatccaaccatc

SEQ ID NO: 990 - DNA, 18 bp, synthetic construct
  source 1..18: mol_type = other DNA
atcaatttatccaaccat

SEQ ID NO: 991 - DNA, 18 bp, synthetic construct
  source 1..18: mol_type = other DNA
catcaatttatccaacca

SEQ ID NO: 992 - DNA, 18 bp, synthetic construct
  source 1..18: mol_type = other DNA
ccatcaatttatccaacc

SEQ ID NO: 993 - DNA, 18 bp, synthetic construct
  source 1..18: mol_type = other DNA
cccatcaatttatccaac

SEQ ID NO: 994 - DNA, 18 bp, synthetic construct
  source 1..18: mol_type = other DNA
acccatcaatttatccaa

SEQ ID NO: 995 - DNA, 18 bp, synthetic construct
  source 1..18: mol_type = other DNA
cacccatcaatttatcca

SEQ ID NO: 996 - DNA, 18 bp, synthetic construct
  source 1..18: mol_type = other DNA
ccacccatcaatttatcc

SEQ ID NO: 997 - DNA, 18 bp, synthetic construct
  source 1..18: mol_type = other DNA
tccacccatcaatttatc

SEQ ID NO: 998 - DNA, 18 bp, synthetic construct
  source 1..18: mol_type = other DNA
atccacccatcaatttat

SEQ ID NO: 999 - DNA, 18 bp, synthetic construct
  source 1..18: mol_type = other DNA
catccacccatcaattta

SEQ ID NO: 1000 - DNA, 18 bp, synthetic construct
  source 1..18: mol_type = other DNA
tccatccacccatcaatt

SEQ ID NO: 1001 - DNA, 18 bp, synthetic construct
  source 1..18: mol_type = other DNA
atccatccacccatcaat

SEQ ID NO: 1002 - DNA, 18 bp, synthetic construct
  source 1..18: mol_type = other DNA
catccatccacccatcaa

SEQ ID NO: 1003 - DNA, 18 bp, synthetic construct
  source 1..18: mol_type = other DNA
ccatccatccacccatca

SEQ ID NO: 1004 - DNA, 18 bp, synthetic construct
  source 1..18: mol_type = other DNA
accatccatccacccatc

SEQ ID NO: 1005 - DNA, 18 bp, synthetic construct
  source 1..18: mol_type = other DNA
aaccatccatccacccat

SEQ ID NO: 1006 - DNA, 18 bp, synthetic construct
  source 1..18: mol_type = other DNA
caaccatccatccaccca

SEQ ID NO: 1007 - DNA, 18 bp, synthetic construct
  source 1..18: mol_type = other DNA
ccaaccatccatccaccc

SEQ ID NO: 1008 - DNA, 18 bp, synthetic construct
  source 1..18: mol_type = other DNA
accaaccatccatccacc

SEQ ID NO: 1009 - DNA, 18 bp, synthetic construct
  source 1..18: mol_type = other DNA
aaccaaccatccatccac

SEQ ID NO: 1010 - DNA, 18 bp, synthetic construct
  source 1..18: mol_type = other DNA
caaccaaccatccatcca

SEQ ID NO: 1011 - DNA, 18 bp, synthetic construct
  source 1..18: mol_type = other DNA
acaaccaaccatccatcc

SEQ ID NO: 1012 - DNA, 18 bp, synthetic construct
  source 1..18: mol_type = other DNA
tacaaccaaccatccatc

SEQ ID NO: 1013 - DNA, 18 bp, synthetic construct
  source 1..18: mol_type = other DNA
atacaaccaaccatccat

SEQ ID NO: 1014 - DNA, 18 bp, synthetic construct
  source 1..18: mol_type = other DNA
catacaaccaaccatcca

SEQ ID NO: 1015 - DNA, 18 bp, synthetic construct
  source 1..18: mol_type = other DNA
tcatacaaccaaccatcc

SEQ ID NO: 1016 - DNA, 18 bp, synthetic construct
  source 1..18: mol_type = other DNA
ttcatacaaccaaccatc

SEQ ID NO: 1017 - DNA, 18 bp, synthetic construct
  source 1..18: mol_type = other DNA
tttcatacaaccaaccat

SEQ ID NO: 1018 - DNA, 18 bp, synthetic construct
  source 1..18: mol_type = other DNA
tctttcatacaaccaacc

SEQ ID NO: 1019 - DNA, 18 bp, synthetic construct
  source 1..18: mol_type = other DNA
ttctttcatacaaccaac

SEQ ID NO: 1020 - DNA, 18 bp, synthetic construct
  source 1..18: mol_type = other DNA
attctttcatacaaccaa

SEQ ID NO: 1021 - DNA, 18 bp, synthetic construct
  source 1..18: mol_type = other DNA
cattctttcatacaacca

SEQ ID NO: 1022 - DNA, 18 bp, synthetic construct
  source 1..18: mol_type = other DNA
tcattctttcatacaacc

SEQ ID NO: 1023 - DNA, 18 bp, synthetic construct
  source 1..18: mol_type = other DNA
ttcattctttcatacaac

SEQ ID NO: 1024 - DNA, 18 bp, synthetic construct
  source 1..18: mol_type = other DNA
attcattctttcatacaa

SEQ ID NO: 1025 - DNA, 18 bp, synthetic construct
  source 1..18: mol_type = other DNA
cattcattctttcataca

SEQ ID NO: 1026 - DNA, 18 bp, synthetic construct
  source 1..18: mol_type = other DNA
tcattcattctttcatac

SEQ ID NO: 1027 - DNA, 18 bp, synthetic construct
  source 1..18: mol_type = other DNA
atcattcattctttcata

SEQ ID NO: 1028 - DNA, 18 bp, synthetic construct
  source 1..18: mol_type = other DNA
aatcattcattctttcat

SEQ ID NO: 1029 - DNA, 18 bp, synthetic construct
  source 1..18: mol_type = other DNA
caatcattcattctttca

SEQ ID NO: 1030 - DNA, 18 bp, synthetic construct
  source 1..18: mol_type = other DNA
ccaatcattcattctttc

SEQ ID NO: 1031 - DNA, 18 bp, synthetic construct
  source 1..18: mol_type = other DNA
cccaatcattcattcttt

SEQ ID NO: 1032 - DNA, 18 bp, synthetic construct
  source 1..18: mol_type = other DNA
acccaatcattcattctt

SEQ ID NO: 1033 - DNA, 18 bp, synthetic construct
  source 1..18: mol_type = other DNA
tacccaatcattcattct

SEQ ID NO: 1034 - DNA, 18 bp, synthetic construct
  source 1..18: mol_type = other DNA
ctacccaatcattcattc

SEQ ID NO: 1035 - DNA, 18 bp, synthetic construct
  source 1..18: mol_type = other DNA
cctacccaatcattcatt

SEQ ID NO: 1036 - DNA, 18 bp, synthetic construct
  source 1..18: mol_type = other DNA
cacctacccaatcattca

SEQ ID NO: 1037 - DNA, 18 bp, synthetic construct
  source 1..18: mol_type = other DNA
ccacctacccaatcattc

SEQ ID NO: 1038 - DNA, 18 bp, synthetic construct
  source 1..18: mol_type = other DNA
tccacctacccaatcatt

SEQ ID NO: 1039 - DNA, 18 bp, synthetic construct
  source 1..18: mol_type = other DNA
atccacctacccaatcat

SEQ ID NO: 1040 - DNA, 18 bp, synthetic construct
  source 1..18: mol_type = other DNA
aatccacctacccaatca

SEQ ID NO: 1041 - DNA, 18 bp, synthetic construct
  source 1..18: mol_type = other DNA
taatccacctacccaatc

SEQ ID NO: 1042 - DNA, 18 bp, synthetic construct
  source 1..18: mol_type = other DNA
ttaatccacctacccaat

SEQ ID NO: 1043 - DNA, 18 bp, synthetic construct
  source 1..18: mol_type = other DNA
cttaatccacctacccaa

SEQ ID NO: 1044 - DNA, 18 bp, synthetic construct
  source 1..18: mol_type = other DNA
acttaatccacctaccca

SEQ ID NO: 1045 - DNA, 18 bp, synthetic construct
  source 1..18: mol_type = other DNA
aacttaatccacctaccc

SEQ ID NO: 1046 - DNA, 18 bp, synthetic construct
  source 1..18: mol_type = other DNA
caacttaatccacctacc

SEQ ID NO: 1047 - DNA, 18 bp, synthetic construct
  source 1..18: mol_type = other DNA
gcaacttaatccacctac

SEQ ID NO: 1048 - DNA, 18 bp, synthetic construct
  source 1..18: mol_type = other DNA
cgcaacttaatccaccta

SEQ ID NO: 1049 - DNA, 18 bp, synthetic construct
  source 1..18: mol_type = other DNA
ccgcaacttaatccacct

SEQ ID NO: 1050 - DNA, 18 bp, synthetic construct
  source 1..18: mol_type = other DNA
tccgcaacttaatccacc

SEQ ID NO: 1051 - DNA, 18 bp, synthetic construct
  source 1..18: mol_type = other DNA
atccgcaacttaatccac

SEQ ID NO: 1052 - DNA, 18 bp, synthetic construct
  source 1..18: mol_type = other DNA
gatccgcaacttaatcca

SEQ ID NO: 1053 - DNA, 18 bp, synthetic construct
  source 1..18: mol_type = other DNA
ttgatccgcaacttaatc

SEQ ID NO: 1054 - DNA, 18 bp, synthetic construct
  source 1..18: mol_type = other DNA
attgatccgcaacttaat

SEQ ID NO: 1055 - DNA, 18 bp, synthetic construct
  source 1..18: mol_type = other DNA
cattgatccgcaacttaa

SEQ ID NO: 1056 - DNA, 18 bp, synthetic construct
  source 1..18: mol_type = other DNA
acattgatccgcaactta

SEQ ID NO: 1057 - DNA, 18 bp, synthetic construct
  source 1..18: mol_type = other DNA
tacattgatccgcaactt

SEQ ID NO: 1058 - DNA, 18 bp, synthetic construct
  source 1..18: mol_type = other DNA
atacattgatccgcaact

SEQ ID NO: 1059 - DNA, 18 bp, synthetic construct
  source 1..18: mol_type = other DNA
catacattgatccgcaac

SEQ ID NO: 1060 - DNA, 18 bp, synthetic construct
  source 1..18: mol_type = other DNA
ccatacattgatccgcaa

SEQ ID NO: 1061 - DNA, 18 bp, synthetic construct
  source 1..18: mol_type = other DNA
cccatacattgatccgca

SEQ ID NO: 1062 - DNA, 18 bp, synthetic construct
  source 1..18: mol_type = other DNA
tcccatacattgatccgc

SEQ ID NO: 1063 - DNA, 18 bp, synthetic construct
  source 1..18: mol_type = other DNA
atcccatacattgatccg

SEQ ID NO: 1064 - DNA, 18 bp, synthetic construct
  source 1..18: mol_type = other DNA
catcccatacattgatcc

SEQ ID NO: 1065 - DNA, 18 bp, synthetic construct
  source 1..18: mol_type = other DNA
ccatcccatacattgatc

SEQ ID NO: 1066 - DNA, 18 bp, synthetic construct
  source 1..18: mol_type = other DNA
tccatcccatacattgat

SEQ ID NO: 1067 - DNA, 18 bp, synthetic construct
  source 1..18: mol_type = other DNA
atccatcccatacattga

SEQ ID NO: 1068 - DNA, 18 bp, synthetic construct
  source 1..18: mol_type = other DNA
catccatcccatacattg

SEQ ID NO: 1069 - DNA, 18 bp, synthetic construct
  source 1..18: mol_type = other DNA
tcatccatcccatacatt

SEQ ID NO: 1070 - DNA, 18 bp, synthetic construct
  source 1..18: mol_type = other DNA
ttcatccatcccatacat

SEQ ID NO: 1071 - DNA, 18 bp, synthetic construct
  source 1..18: mol_type = other DNA
cattcatccatcccatac

SEQ ID NO: 1072 - DNA, 18 bp, synthetic construct
  source 1..18: mol_type = other DNA
ccattcatccatcccata

SEQ ID NO: 1073 - DNA, 18 bp, synthetic construct
  source 1..18: mol_type = other DNA
tccattcatccatcccat

SEQ ID NO: 1074 - DNA, 18 bp, synthetic construct
  source 1..18: mol_type = other DNA
atccattcatccatccca

SEQ ID NO: 1075 - DNA, 18 bp, synthetic construct
  source 1..18: mol_type = other DNA
catccattcatccatccc

SEQ ID NO: 1076 - DNA, 18 bp, synthetic construct
  source 1..18: mol_type = other DNA
ccatccattcatccatcc

SEQ ID NO: 1077 - DNA, 18 bp, synthetic construct
  source 1..18: mol_type = other DNA
tccatccattcatccatc

SEQ ID NO: 1078 - DNA, 18 bp, synthetic construct
  source 1..18: mol_type = other DNA
atccatccattcatccat

SEQ ID NO: 1079 - DNA, 18 bp, synthetic construct
  source 1..18: mol_type = other DNA
catccatccattcatcca

SEQ ID NO: 1080 - DNA, 18 bp, synthetic construct
  source 1..18: mol_type = other DNA
ccatccatccattcatcc

SEQ ID NO: 1081 - DNA, 18 bp, synthetic construct
  source 1..18: mol_type = other DNA
tccatccatccattcatc

SEQ ID NO: 1082 - DNA, 18 bp, synthetic construct
  source 1..18: mol_type = other DNA
atccatccatccattcat

SEQ ID NO: 1083 - DNA, 18 bp, synthetic construct
  source 1..18: mol_type = other DNA
catccatccatccattca

SEQ ID NO: 1084 - DNA, 18 bp, synthetic construct
  source 1..18: mol_type = other DNA
ccatccatccatccattc

SEQ ID NO: 1085 - DNA, 18 bp, synthetic construct
  source 1..18: mol_type = other DNA
tccatccatccatccatt

SEQ ID NO: 1086 - DNA, 18 bp, synthetic construct
  source 1..18: mol_type = other DNA
atccatccatccatccat

SEQ ID NO: 1087 - DNA, 18 bp, synthetic construct
  source 1..18: mol_type = other DNA
catccatccatccatcca

SEQ ID NO: 1088 - DNA, 18 bp, synthetic construct
  source 1..18: mol_type = other DNA
acatccatccatccatcc

SEQ ID NO: 1089 - DNA, 18 bp, synthetic construct
  source 1..18: mol_type = other DNA
cacatccatccatccatc

SEQ ID NO: 1090 - DNA, 18 bp, synthetic construct
  source 1..18: mol_type = other DNA
cacacatccatccatcca

SEQ ID NO: 1091 - DNA, 18 bp, synthetic construct
  source 1..18: mol_type = other DNA
ccacacatccatccatcc

SEQ ID NO: 1092 - DNA, 18 bp, synthetic construct
  source 1..18: mol_type = other DNA
accacacatccatccatc

SEQ ID NO: 1093 - DNA, 18 bp, synthetic construct
  source 1..18: mol_type = other DNA
aaccacacatccatccat

SEQ ID NO: 1094 - DNA, 18 bp, synthetic construct
  source 1..18: mol_type = other DNA
caaccacacatccatcca

SEQ ID NO: 1095 - DNA, 18 bp, synthetic construct
  source 1..18: mol_type = other DNA
tcaaccacacatccatcc

SEQ ID NO: 1096 - DNA, 18 bp, synthetic construct
  source 1..18: mol_type = other DNA
ttcaaccacacatccatc

SEQ ID NO: 1097 - DNA, 18 bp, synthetic construct
  source 1..18: mol_type = other DNA
attcaaccacacatccat

SEQ ID NO: 1098 - DNA, 18 bp, synthetic construct
  source 1..18: mol_type = other DNA
aattcaaccacacatcca

SEQ ID NO: 1099 - DNA, 18 bp, synthetic construct
  source 1..18: mol_type = other DNA
taattcaaccacacatcc

SEQ ID NO: 1100 - DNA, 18 bp, synthetic construct
  source 1..18: mol_type = other DNA
gtaattcaaccacacatc

SEQ ID NO: 1101 - DNA, 18 bp, synthetic construct
  source 1..18: mol_type = other DNA
agtaattcaaccacacat

SEQ ID NO: 1102 - DNA, 18 bp, synthetic construct
  source 1..18: mol_type = other DNA
cagtaattcaaccacaca

SEQ ID NO: 1103 - DNA, 18 bp, synthetic construct
  source 1..18: mol_type = other DNA
tcagtaattcaaccacac

SEQ ID NO: 1104 - DNA, 18 bp, synthetic construct
  source 1..18: mol_type = other DNA
ttcagtaattcaaccaca

SEQ ID NO: 1105 - DNA, 18 bp, synthetic construct
  source 1..18: mol_type = other DNA
tttcagtaattcaaccac

SEQ ID NO: 1106 - DNA, 18 bp, synthetic construct
  source 1..18: mol_type = other DNA
ctttcagtaattcaacca

SEQ ID NO: 1107 - DNA, 18 bp, synthetic construct
  source 1..18: mol_type = other DNA
cctttcagtaattcaacc

SEQ ID NO: 1108 - DNA, 18 bp, synthetic construct
  source 1..18: mol_type = other DNA
aacctttcagtaattcaa

SEQ ID NO: 1109 - DNA, 18 bp, synthetic construct
  source 1..18: mol_type = other DNA
caacctttcagtaattca

SEQ ID NO: 1110 - DNA, 18 bp, synthetic construct
  source 1..18: mol_type = other DNA
ccaacctttcagtaattc

SEQ ID NO: 1111 - DNA, 18 bp, synthetic construct
  source 1..18: mol_type = other DNA
tccaacctttcagtaatt

SEQ ID NO: 1112 - DNA, 18 bp, synthetic construct
  source 1..18: mol_type = other DNA
ttccaacctttcagtaat

SEQ ID NO: 1113 - DNA, 18 bp, synthetic construct
  source 1..18: mol_type = other DNA
cttccaacctttcagtaa

SEQ ID NO: 1114 - DNA, 18 bp, synthetic construct
  source 1..18: mol_type = other DNA
tcttccaacctttcagta

SEQ ID NO: 1115 - DNA, 18 bp, synthetic construct
  source 1..18: mol_type = other DNA
ctcttccaacctttcagt

SEQ ID NO: 1116 - DNA, 18 bp, synthetic construct
  source 1..18: mol_type = other DNA
actcttccaacctttcag

SEQ ID NO: 1117 - DNA, 18 bp, synthetic construct
  source 1..18: mol_type = other DNA
cactcttccaacctttca

SEQ ID NO: 1118 - DNA, 18 bp, synthetic construct
  source 1..18: mol_type = other DNA
ccactcttccaacctttc

SEQ ID NO: 1119 - DNA, 18 bp, synthetic construct
  source 1..18: mol_type = other DNA
tccactcttccaaccttt

SEQ ID NO: 1120 - DNA, 18 bp, synthetic construct
  source 1..18: mol_type = other DNA
atccactcttccaacctt

SEQ ID NO: 1121 - DNA, 18 bp, synthetic construct
  source 1..18: mol_type = other DNA
catccactcttccaacct

SEQ ID NO: 1122 - DNA, 18 bp, synthetic construct
  source 1..18: mol_type = other DNA
ccatccactcttccaacc

SEQ ID NO: 1123 - DNA, 18 bp, synthetic construct
  source 1..18: mol_type = other DNA
cccatccactcttccaac

SEQ ID NO: 1124 - DNA, 18 bp, synthetic construct
  source 1..18: mol_type = other DNA
acccatccactcttccaa

SEQ ID NO: 1125 - DNA, 18 bp, synthetic construct
  source 1..18: mol_type = other DNA
cacccatccactcttcca

SEQ ID NO: 1126 - DNA, 18 bp, synthetic construct
  source 1..18: mol_type = other DNA
tcacccatccactcttcc

SEQ ID NO: 1127 - DNA, 18 bp, synthetic construct
  source 1..18: mol_type = other DNA
tttcacccatccactctt

SEQ ID NO: 1128 - DNA, 18 bp, synthetic construct
  source 1..18: mol_type = other DNA
atttcacccatccactct

SEQ ID NO: 1129 - DNA, 18 bp, synthetic construct
  source 1..18: mol_type = other DNA
aatttcacccatccactc

SEQ ID NO: 1130 - DNA, 18 bp, synthetic construct
  source 1..18: mol_type = other DNA
aaatttcacccatccact

SEQ ID NO: 1131 - DNA, 18 bp, synthetic construct
  source 1..18: mol_type = other DNA
caaatttcacccatccac

SEQ ID NO: 1132 - DNA, 18 bp, synthetic construct
  source 1..18: mol_type = other DNA
ccaaatttcacccatcca

SEQ ID NO: 1133 - DNA, 18 bp, synthetic construct
  source 1..18: mol_type = other DNA
cccaaatttcacccatcc

SEQ ID NO: 1134 - DNA, 18 bp, synthetic construct
  source 1..18: mol_type = other DNA
ccccaaatttcacccatc

SEQ ID NO: 1135 - DNA, 18 bp, synthetic construct
  source 1..18: mol_type = other DNA
accccaaatttcacccat

SEQ ID NO: 1136 - DNA, 18 bp, synthetic construct
  source 1..18: mol_type = other DNA
taccccaaatttcaccca

SEQ ID NO: 1137 - DNA, 18 bp, synthetic construct
  source 1..18: mol_type = other DNA
ctaccccaaatttcaccc

SEQ ID NO: 1138 - DNA, 18 bp, synthetic construct
  source 1..18: mol_type = other DNA
actaccccaaatttcacc

SEQ ID NO: 1139 - DNA, 18 bp, synthetic construct
  source 1..18: mol_type = other DNA
aactaccccaaatttcac

SEQ ID NO: 1140 - DNA, 18 bp, synthetic construct
  source 1..18: mol_type = other DNA
taactaccccaaatttca

SEQ ID NO: 1141 - DNA, 18 bp, synthetic construct
  source 1..18: mol_type = other DNA
ctaactaccccaaatttc

SEQ ID NO: 1142 - DNA, 18 bp, synthetic construct
  source 1..18: mol_type = other DNA
tctaactaccccaaattt

SEQ ID NO: 1143 - DNA, 18 bp, synthetic construct
  source 1..18: mol_type = other DNA
atctaactaccccaaatt

SEQ ID NO: 1144 - DNA, 18 bp, synthetic construct
  source 1..18: mol_type = other DNA
catctaactaccccaaat

SEQ ID NO: 1145 - DNA, 18 bp, synthetic construct
  source 1..18: mol_type = other DNA
ccatctaactaccccaaa

SEQ ID NO: 1146 - DNA, 18 bp, synthetic construct
  source 1..18: mol_type = other DNA
acccatctaactacccca

SEQ ID NO: 1147 - DNA, 18 bp, synthetic construct
  source 1..18: mol_type = other DNA
cacccatctaactacccc

SEQ ID NO: 1148 - DNA, 18 bp, synthetic construct
  source 1..18: mol_type = other DNA
ccacccatctaactaccc

SEQ ID NO: 1149 - DNA, 18 bp, synthetic construct
  source 1..18: mol_type = other DNA
cccacccatctaactacc

SEQ ID NO: 1150 - DNA, 18 bp, synthetic construct
  source 1..18: mol_type = other DNA
acccacccatctaactac

SEQ ID NO: 1151 - DNA, 18 bp, synthetic construct
  source 1..18: mol_type = other DNA
cacccacccatctaacta

SEQ ID NO: 1152 - DNA, 18 bp, synthetic construct
  source 1..18: mol_type = other DNA
acacccacccatctaact

SEQ ID NO: 1153 - DNA, 18 bp, synthetic construct
  source 1..18: mol_type = other DNA
cacacccacccatctaac

SEQ ID NO: 1154 - DNA, 18 bp, synthetic construct
  source 1..18: mol_type = other DNA
acacacccacccatctaa

SEQ ID NO: 1155 - DNA, 18 bp, synthetic construct
  source 1..18: mol_type = other DNA
cacacacccacccatcta

SEQ ID NO: 1156 - DNA, 18 bp, synthetic construct
  source 1..18: mol_type = other DNA
ccacacacccacccatct

SEQ ID NO: 1157 - DNA, 18 bp, synthetic construct
  source 1..18: mol_type = other DNA
tccacacacccacccatc

SEQ ID NO: 1158 - DNA, 18 bp, synthetic construct
  source 1..18: mol_type = other DNA
atccacacacccacccat

SEQ ID NO: 1159 - DNA, 18 bp, synthetic construct
  source 1..18: mol_type = other DNA
catccacacacccaccca

SEQ ID NO: 1160 - DNA, 18 bp, synthetic construct
  source 1..18: mol_type = other DNA
ccatccacacacccaccc

SEQ ID NO: 1161 - DNA, 18 bp, synthetic construct
  source 1..18: mol_type = other DNA
tccatccacacacccacc

SEQ ID NO: 1162 - DNA, 18 bp, synthetic construct
  source 1..18: mol_type = other DNA
atccatccacacacccac

SEQ ID NO: 1163 - DNA, 18 bp, synthetic construct
  source 1..18: mol_type = other DNA
tatccatccacacaccca

SEQ ID NO: 1164 - DNA, 18 bp, synthetic construct
  source 1..18: mol_type = other DNA
ttatccatccacacaccc

SEQ ID NO: 1165 - DNA, 18 bp, synthetic construct
  source 1..18: mol_type = other DNA
ttttatccatccacacac

SEQ ID NO: 1166 - DNA, 18 bp, synthetic construct
  source 1..18: mol_type = other DNA
cttttatccatccacaca

SEQ ID NO: 1167 - DNA, 18 bp, synthetic construct
  source 1..18: mol_type = other DNA
tcttttatccatccacac

SEQ ID NO: 1168 - DNA, 18 bp, synthetic construct
  source 1..18: mol_type = other DNA
ctcttttatccatccaca

SEQ ID NO: 1169 - DNA, 18 bp, synthetic construct
  source 1..18: mol_type = other DNA
actcttttatccatccac

SEQ ID NO: 1170 - DNA, 18 bp, synthetic construct
  source 1..18: mol_type = other DNA
tactcttttatccatcca

SEQ ID NO: 1171 - DNA, 18 bp, synthetic construct
  source 1..18: mol_type = other DNA
ctactcttttatccatcc

SEQ ID NO: 1172 - DNA, 18 bp, synthetic construct
  source 1..18: mol_type = other DNA
tctactcttttatccatc

SEQ ID NO: 1173 - DNA, 18 bp, synthetic construct
  source 1..18: mol_type = other DNA
atctactcttttatccat

SEQ ID NO: 1174 - DNA, 18 bp, synthetic construct
  source 1..18: mol_type = other DNA
catctactcttttatcca

SEQ ID NO: 1175 - DNA, 18 bp, synthetic construct
  source 1..18: mol_type = other DNA
tcatctactcttttatcc

SEQ ID NO: 1176 - DNA, 18 bp, synthetic construct
  source 1..18: mol_type = other DNA
ttcatctactcttttatc

SEQ ID NO: 1177 - DNA, 18 bp, synthetic construct
  source 1..18: mol_type = other DNA
attcatctactcttttat

SEQ ID NO: 1178 - DNA, 18 bp, synthetic construct
  source 1..18: mol_type = other DNA
cattcatctactctttta

SEQ ID NO: 1179 - DNA, 18 bp, synthetic construct
  source 1..18: mol_type = other DNA
tcattcatctactctttt

SEQ ID NO: 1180 - DNA, 18 bp, synthetic construct
  source 1..18: mol_type = other DNA
ttcattcatctactcttt

SEQ ID NO: 1181 - DNA, 18 bp, synthetic construct
  source 1..18: mol_type = other DNA
aattcattcatctactct

SEQ ID NO: 1182 - DNA, 18 bp, synthetic construct
  source 1..18: mol_type = other DNA
taattcattcatctactc

SEQ ID NO: 1183 - DNA, 18 bp, synthetic construct
  source 1..18: mol_type = other DNA
ttaattcattcatctact

SEQ ID NO: 1184 - DNA, 18 bp, synthetic construct
  source 1..18: mol_type = other DNA
attaattcattcatctac

SEQ ID NO: 1185 - DNA, 18 bp, synthetic construct
  source 1..18: mol_type = other DNA
cattaattcattcatcta

SEQ ID NO: 1186 - DNA, 18 bp, synthetic construct
  source 1..18: mol_type = other DNA
tcattaattcattcatct

SEQ ID NO: 1187 - DNA, 18 bp, synthetic construct
  source 1..18: mol_type = other DNA
ttcattaattcattcatc

SEQ ID NO: 1188 - DNA, 18 bp, synthetic construct
  source 1..18: mol_type = other DNA
attcattaattcattcat

SEQ ID NO: 1189 - DNA, 18 bp, synthetic construct
  source 1..18: mol_type = other DNA
tattcattaattcattca

SEQ ID NO: 1190 - DNA, 18 bp, synthetic construct
  source 1..18: mol_type = other DNA
ttattcattaattcattc

SEQ ID NO: 1191 - DNA, 18 bp, synthetic construct
  source 1..18: mol_type = other DNA
tttattcattaattcatt

SEQ ID NO: 1192 - DNA, 18 bp, synthetic construct
  source 1..18: mol_type = other DNA
gtttattcattaattcat

SEQ ID NO: 1193 - DNA, 18 bp, synthetic construct
  source 1..18: mol_type = other DNA
tgtttattcattaattca

SEQ ID NO: 1194 - DNA, 18 bp, synthetic construct
  source 1..18: mol_type = other DNA
ctgtttattcattaattc

SEQ ID NO: 1195 - DNA, 18 bp, synthetic construct
  source 1..18: mol_type = other DNA
cctgtttattcattaatt

SEQ ID NO: 1196 - DNA, 18 bp, synthetic construct
  source 1..18: mol_type = other DNA
gcctgtttattcattaat

SEQ ID NO: 1197 - DNA, 18 bp, synthetic construct
  source 1..18: mol_type = other DNA
tgcctgtttattcattaa

SEQ ID NO: 1198 - DNA, 18 bp, synthetic construct
  source 1..18: mol_type = other DNA
ctgcctgtttattcatta

SEQ ID NO: 1199 - DNA, 18 bp, synthetic construct
  source 1..18: mol_type = other DNA
tctgcctgtttattcatt

SEQ ID NO: 1200 - DNA, 18 bp, synthetic construct
  source 1..18: mol_type = other DNA
catctgcctgtttattca

SEQ ID NO: 1201 - DNA, 18 bp, synthetic construct
  source 1..18: mol_type = other DNA
ccatctgcctgtttattc

SEQ ID NO: 1202 - DNA, 18 bp, synthetic construct
  source 1..18: mol_type = other DNA
tccatctgcctgtttatt

SEQ ID NO: 1203 - DNA, 18 bp, synthetic construct
  source 1..18: mol_type = other DNA
atccatctgcctgtttat

SEQ ID NO: 1204 - DNA, 18 bp, synthetic construct
  source 1..18: mol_type = other DNA
catccatctgcctgttta

SEQ ID NO: 1205 - DNA, 18 bp, synthetic construct
  source 1..18: mol_type = other DNA
tcatccatctgcctgttt

SEQ ID NO: 1206 - DNA, 18 bp, synthetic construct
  source 1..18: mol_type = other DNA
atcatccatctgcctgtt

SEQ ID NO: 1207 - DNA, 18 bp, synthetic construct
  source 1..18: mol_type = other DNA
catcatccatctgcctgt

SEQ ID NO: 1208 - DNA, 18 bp, synthetic construct
  source 1..18: mol_type = other DNA
acatcatccatctgcctg

SEQ ID NO: 1209 - DNA, 18 bp, synthetic construct
  source 1..18: mol_type = other DNA
tacatcatccatctgcct

SEQ ID NO: 1210 - DNA, 18 bp, synthetic construct
  source 1..18: mol_type = other DNA
ttacatcatccatctgcc

SEQ ID NO: 1211 - DNA, 18 bp, synthetic construct
  source 1..18: mol_type = other DNA
cttacatcatccatctgc

SEQ ID NO: 1212 - DNA, 18 bp, synthetic construct
  source 1..18: mol_type = other DNA
gcttacatcatccatctg

SEQ ID NO: 1213 - DNA, 18 bp, synthetic construct
  source 1..18: mol_type = other DNA
agcttacatcatccatct

SEQ ID NO: 1214 - DNA, 18 bp, synthetic construct
  source 1..18: mol_type = other DNA
cagcttacatcatccatc

SEQ ID NO: 1215 - DNA, 18 bp, synthetic construct
  source 1..18: mol_type = other DNA
ggcagcttacatcatcca

SEQ ID NO: 1216 - DNA, 18 bp, synthetic construct
  source 1..18: mol_type = other DNA
gggcagcttacatcatcc

SEQ ID NO: 1217 - DNA, 18 bp, synthetic construct
  source 1..18: mol_type = other DNA
ggggcagcttacatcatc

SEQ ID NO: 1218 - DNA, 18 bp, synthetic construct
  source 1..18: mol_type = other DNA
tggggcagcttacatcat

SEQ ID NO: 1219 - DNA, 18 bp, synthetic construct
  source 1..18: mol_type = other DNA
ctggggcagcttacatca

SEQ ID NO: 1220 - DNA, 18 bp, synthetic construct
  source 1..18: mol_type = other DNA
tctggggcagcttacatc

SEQ ID NO: 1221 - DNA, 18 bp, synthetic construct
  source 1..18: mol_type = other DNA
gtctggggcagcttacat

SEQ ID NO: 1222 - DNA, 18 bp, synthetic construct
  source 1..18: mol_type = other DNA
ggtctggggcagcttaca

SEQ ID NO: 1223 - DNA, 18 bp, synthetic construct
  source 1..18: mol_type = other DNA
gggtctggggcagcttac

SEQ ID NO: 1224 - DNA, 18 bp, synthetic construct
  source 1..18: mol_type = other DNA
agggtctggggcagctta

SEQ ID NO: 1225 - DNA, 18 bp, synthetic construct
  source 1..18: mol_type = other DNA
cagggtctggggcagctt

SEQ ID NO: 1226 - DNA, 18 bp, synthetic construct
  source 1..18: mol_type = other DNA
cccagggtctggggcagc

SEQ ID NO: 1227 - DNA, 18 bp, synthetic construct
  source 1..18: mol_type = other DNA
tcccagggtctggggcag

SEQ ID NO: 1228 - DNA, 18 bp, synthetic construct
  source 1..18: mol_type = other DNA
gtcccagggtctggggca

SEQ ID NO: 1229 - DNA, 18 bp, synthetic construct
  source 1..18: mol_type = other DNA
ggtcccagggtctggggc

SEQ ID NO: 1230 - DNA, 18 bp, synthetic construct
  source 1..18: mol_type = other DNA
aggtcccagggtctgggg

SEQ ID NO: 1231 - DNA, 18 bp, synthetic construct
  source 1..18: mol_type = other DNA
gaggtcccagggtctggg

SEQ ID NO: 1232 - DNA, 18 bp, synthetic construct
  source 1..18: mol_type = other DNA
agaggtcccagggtctgg

SEQ ID NO: 1233 - DNA, 18 bp, synthetic construct
  source 1..18: mol_type = other DNA
cagaggtcccagggtctg

SEQ ID NO: 1234 - DNA, 18 bp, synthetic construct
  source 1..18: mol_type = other DNA
tcagaggtcccagggtct

SEQ ID NO: 1235 - DNA, 18 bp, synthetic construct
  source 1..18: mol_type = other DNA
gtcagaggtcccagggtc

SEQ ID NO: 1236 - DNA, 18 bp, synthetic construct
  source 1..18: mol_type = other DNA
ggtcagaggtcccagggt

SEQ ID NO: 1237 - DNA, 18 bp, synthetic construct
  source 1..18: mol_type = other DNA
gggtcagaggtcccaggg

SEQ ID NO: 1238 - DNA, 18 bp, synthetic construct
  source 1..18: mol_type = other DNA
ggggtcagaggtcccagg

SEQ ID NO: 1239 - DNA, 18 bp, synthetic construct
  source 1..18: mol_type = other DNA
gggggtcagaggtcccag

SEQ ID NO: 1240 - DNA, 18 bp, synthetic construct
  source 1..18: mol_type = other DNA
cgggggtcagaggtccca

SEQ ID NO: 1241 - DNA, 18 bp, synthetic construct
  source 1..18: mol_type = other DNA
ccgggggtcagaggtccc

SEQ ID NO: 1242 - DNA, 18 bp, synthetic construct
  source 1..18: mol_type = other DNA
gccgggggtcagaggtcc

SEQ ID NO: 1243 - DNA, 18 bp, synthetic construct
  source 1..18: mol_type = other DNA
cgccgggggtcagaggtc

SEQ ID NO: 1244 - DNA, 18 bp, synthetic construct
  source 1..18: mol_type = other DNA
tcgccgggggtcagaggt

SEQ ID NO: 1245 - DNA, 18 bp, synthetic construct
  source 1..18: mol_type = other DNA
ggtcgccgggggtcagag

SEQ ID NO: 1246 - DNA, 18 bp, synthetic construct
  source 1..18: mol_type = other DNA
gggtcgccgggggtcaga

SEQ ID NO: 1247 - DNA, 18 bp, synthetic construct
  source 1..18: mol_type = other DNA
ggggtcgccgggggtcag

SEQ ID NO: 1248 - DNA, 18 bp, synthetic construct
  source 1..18: mol_type = other DNA
aggggtcgccgggggtca

SEQ ID NO: 1249 - DNA, 18 bp, synthetic construct
  source 1..18: mol_type = other DNA
aaggggtcgccgggggtc

SEQ ID NO: 1250 - DNA, 18 bp, synthetic construct
  source 1..18: mol_type = other DNA
caaggggtcgccgggggt

SEQ ID NO: 1251 - DNA, 18 bp, synthetic construct
  source 1..18: mol_type = other DNA
gcaaggggtcgccggggg

SEQ ID NO: 1252 - DNA, 18 bp, synthetic construct
  source 1..18: mol_type = other DNA
tgcaaggggtcgccgggg

SEQ ID NO: 1253 - DNA, 18 bp, synthetic construct
  source 1..18: mol_type = other DNA
gtgcaaggggtcgccggg

SEQ ID NO: 1254 - DNA, 18 bp, synthetic construct
  source 1..18: mol_type = other DNA
agtgcaaggggtcgccgg

SEQ ID NO: 1255 - DNA, 18 bp, synthetic construct
  source 1..18: mol_type = other DNA
gagtgcaaggggtcgccg

SEQ ID NO: 1256 - DNA, 18 bp, synthetic construct
  source 1..18: mol_type = other DNA
agagtgcaaggggtcgcc

SEQ ID NO: 1257 - DNA, 18 bp, synthetic construct
  source 1..18: mol_type = other DNA
gagagtgcaaggggtcgc

SEQ ID NO: 1258 - DNA, 18 bp, synthetic construct
  source 1..18: mol_type = other DNA
ggagagtgcaaggggtcg

SEQ ID NO: 1259 - DNA, 18 bp, synthetic construct
  source 1..18: mol_type = other DNA
tggagagtgcaaggggtc

SEQ ID NO: 1260 - DNA, 18 bp, synthetic construct
  source 1..18: mol_type = other DNA
atggagagtgcaaggggt

SEQ ID NO: 1261 - DNA, 18 bp, synthetic construct
  source 1..18: mol_type = other DNA
catggagagtgcaagggg

SEQ ID NO: 1262 - DNA, 18 bp, synthetic construct
  source 1..18: mol_type = other DNA
tcatggagagtgcaaggg

SEQ ID NO: 1263 - DNA, 18 bp, synthetic construct
  source 1..18: mol_type = other DNA
gtcatggagagtgcaagg

SEQ ID NO: 1264 - DNA, 18 bp, synthetic construct
  source 1..18: mol_type = other DNA
gtgtcatggagagtgcaa

SEQ ID NO: 1265 - DNA, 18 bp, synthetic construct
  source 1..18: mol_type = other DNA
agtgtcatggagagtgca

SEQ ID NO: 1266 - DNA, 18 bp, synthetic construct
  source 1..18: mol_type = other DNA
aagtgtcatggagagtgc

SEQ ID NO: 1267 - DNA, 18 bp, synthetic construct
  source 1..18: mol_type = other DNA
aaagtgtcatggagagtg

SEQ ID NO: 1268 - DNA, 18 bp, synthetic construct
  source 1..18: mol_type = other DNA
gaaagtgtcatggagagt

SEQ ID NO: 1269 - DNA, 18 bp, synthetic construct
  source 1..18: mol_type = other DNA
agaaagtgtcatggagag

SEQ ID NO: 1270 - DNA, 18 bp, synthetic construct
  source 1..18: mol_type = other DNA
gagaaagtgtcatggaga

SEQ ID NO: 1271 - DNA, 18 bp, synthetic construct
  source 1..18: mol_type = other DNA
agagaaagtgtcatggag

SEQ ID NO: 1272 - DNA, 18 bp, synthetic construct
  source 1..18: mol_type = other DNA
gagagaaagtgtcatgga

SEQ ID NO: 1273 - DNA, 18 bp, synthetic construct
  source 1..18: mol_type = other DNA
ggagagaaagtgtcatgg

SEQ ID NO: 1274 - DNA, 18 bp, synthetic construct
  source 1..18: mol_type = other DNA
gggagagaaagtgtcatg

SEQ ID NO: 1275 - DNA, 18 bp, synthetic construct
  source 1..18: mol_type = other DNA
tgggagagaaagtgtcat

SEQ ID NO: 1276 - DNA, 18 bp, synthetic construct
  source 1..18: mol_type = other DNA
atgggagagaaagtgtca

SEQ ID NO: 1277 - DNA, 18 bp, synthetic construct
  source 1..18: mol_type = other DNA
catgggagagaaagtgtc

SEQ ID NO: 1278 - DNA, 18 bp, synthetic construct
  source 1..18: mol_type = other DNA
ccatgggagagaaagtgt

SEQ ID NO: 1279 - DNA, 18 bp, synthetic construct
  source 1..18: mol_type = other DNA
accatgggagagaaagtg

SEQ ID NO: 1280 - DNA, 18 bp, synthetic construct
  source 1..18: mol_type = other DNA
caccatgggagagaaagt

SEQ ID NO: 1281 - DNA, 18 bp, synthetic construct
  source 1..18: mol_type = other DNA
ccaccatgggagagaaag

SEQ ID NO: 1282 - DNA, 18 bp, synthetic construct
  source 1..18: mol_type = other DNA
gccaccatgggagagaaa

SEQ ID NO: 1283 - DNA, 18 bp, synthetic construct
  source 1..18: mol_type = other DNA
ctgccaccatgggagaga

SEQ ID NO: 1284 - DNA, 18 bp, synthetic construct
  source 1..18: mol_type = other DNA
ggcccctcccatgccact

SEQ ID NO: 1285 - DNA, 18 bp, synthetic construct
  source 1..18: mol_type = other DNA
acttccactcaccattcc

SEQ ID NO: 1286 - DNA, 18 bp, synthetic construct
  source 1..18: mol_type = other DNA
cctgcccagctcttcctc

SEQ ID NO: 1287 - DNA, 18 bp, synthetic construct
  source 1..18: mol_type = other DNA
tttctggccacaccatcc

SEQ ID NO: 1288 - DNA, 18 bp, synthetic construct
  source 1..18: mol_type = other DNA
tccacactctcctggccc

SEQ ID NO: 1289 - DNA, 18 bp, synthetic construct
  source 1..18: mol_type = other DNA
ccctctgagactgcccgc

SEQ ID NO: 1290 - DNA, 18 bp, synthetic construct
  source 1..18: mol_type = other DNA
ccgccatgccattccctt

SEQ ID NO: 1291 - DNA, 18 bp, synthetic construct
  source 1..18: mol_type = other DNA
acctggaaaactcctccc

SEQ ID NO: 1292 - DNA, 18 bp, synthetic construct
  source 1..18: mol_type = other DNA
ccctatccatcaaagtcc

SEQ ID NO: 1293 - DNA, 18 bp, synthetic construct
  source 1..18: mol_type = other DNA
agattcagggtcacctcc

SEQ ID NO: 1294 - DNA, 18 bp, synthetic construct
  source 1..18: mol_type = other DNA
cctctgggaagcccacct

SEQ ID NO: 1295 - DNA, 18 bp, synthetic construct
  source 1..18: mol_type = other DNA
ttggcctccaggttgact

SEQ ID NO: 1296 - DNA, 18 bp, synthetic construct
  source 1..18: mol_type = other DNA
ggttgactctcactactc

SEQ ID NO: 1297 - DNA, 18 bp, synthetic construct
  source 1..18: mol_type = other DNA
ctactcatcatcaggttc

SEQ ID NO: 1298 - DNA, 18 bp, synthetic construct
  source 1..18: mol_type = other DNA
ttccttctattccagccc

SEQ ID NO: 1299 - DNA, 18 bp, synthetic construct
  source 1..18: mol_type = other DNA
ctaaccactcaggattgg

SEQ ID NO: 1300 - DNA, 18 bp, synthetic construct
  source 1..18: mol_type = other DNA
gggccgtttgtgtctggg

SEQ ID NO: 1301 - DNA, 18 bp, synthetic construct
  source 1..18: mol_type = other DNA
atgtctcttccagctgcc

SEQ ID NO: 1302 - DNA, 18 bp, synthetic construct
  source 1..18: mol_type = other DNA
gggtttcctggaaagaac

SEQ ID NO: 1303 - DNA, 18 bp, synthetic construct
  source 1..18: mol_type = other DNA
actcttatccccaggaac

SEQ ID NO: 1304 - DNA, 18 bp, synthetic construct
  source 1..18: mol_type = other DNA
gaactagtttgttgaata

SEQ ID NO: 1305 - DNA, 18 bp, synthetic construct
  source 1..18: mol_type = other DNA
atgctggtgaatgaatga

SEQ ID NO: 1306 - DNA, 18 bp, synthetic construct
  source 1..18: mol_type = other DNA
tgaatgattgaacagatg

SEQ ID NO: 1307 - DNA, 18 bp, synthetic construct
  source 1..18: mol_type = other DNA
tgaatgagtgatgagtag

SEQ ID NO: 1308 - DNA, 18 bp, synthetic construct
  source 1..18: mol_type = other DNA
taaaaggatggatggaga

SEQ ID NO: 1309 - DNA, 18 bp, synthetic construct
  source 1..18: mol_type = other DNA
agagatgggtgagtacat

SEQ ID NO: 1310 - DNA, 18 bp, synthetic construct
  source 1..18: mol_type = other DNA
catggatggatagatgga

SEQ ID NO: 1311 - DNA, 18 bp, synthetic construct
  source 1..18: mol_type = other DNA
gatgagttggtgggtaga

SEQ ID NO: 1312 - DNA, 18 bp, synthetic construct
  source 1..18: mol_type = other DNA
agattcgtggctagatgg

SEQ ID NO: 1313 - DNA, 18 bp, synthetic construct
  source 1..18: mol_type = other DNA
tgatggatggatggacag

SEQ ID NO: 1314 - DNA, 18 bp, synthetic construct
  source 1..18: mol_type = other DNA
agatggatggatatatga

SEQ ID NO: 1315 - DNA, 18 bp, synthetic construct
  source 1..18: mol_type = other DNA
tgattgaactattgaaag

SEQ ID NO: 1316 - DNA, 18 bp, synthetic construct
  source 1..18: mol_type = other DNA
gtatagatgtatggatgg

SEQ ID NO: 1317 - DNA, 18 bp, synthetic construct
  source 1..18: mol_type = other DNA
ggtgaatttgggggtaat

SEQ ID NO: 1318 - DNA, 18 bp, synthetic construct
  source 1..18: mol_type = other DNA
aattgttagatgatggat

SEQ ID NO: 1319 - DNA, 18 bp, synthetic construct
  source 1..18: mol_type = other DNA
gatgagtatagatgaatg

SEQ ID NO: 1320 - DNA, 18 bp, synthetic construct
  source 1..18: mol_type = other DNA
aatgatggatggataact

SEQ ID NO: 1321 - DNA, 18 bp, synthetic construct
  source 1..18: mol_type = other DNA
ggataacttgatgagtgg

SEQ ID NO: 1322 - DNA, 18 bp, synthetic construct
  source 1..18: mol_type = other DNA
atagatagattgctggat

SEQ ID NO: 1323 - DNA, 18 bp, synthetic construct
  source 1..18: mol_type = other DNA
atgattgactgggtggat

SEQ ID NO: 1324 - DNA, 18 bp, synthetic construct
  source 1..18: mol_type = other DNA
atgaaatgttggatgagc

SEQ ID NO: 1325 - DNA, 18 bp, synthetic construct
  source 1..18: mol_type = other DNA
cagattaagttgtattgg

SEQ ID NO: 1326 - DNA, 18 bp, synthetic construct
  source 1..18: mol_type = other DNA
tgggatggatggaagtgt

SEQ ID NO: 1327 - DNA, 18 bp, synthetic construct
  source 1..18: mol_type = other DNA
ttgagttattagaaggaa

SEQ ID NO: 1328 - DNA, 18 bp, synthetic construct
  source 1..18: mol_type = other DNA
agattgagtagataggtg

SEQ ID NO: 1329 - DNA, 18 bp, synthetic construct
  source 1..18: mol_type = other DNA
tttgttgatagtcagatg

SEQ ID NO: 1330 - DNA, 18 bp, synthetic construct
  source 1..18: mol_type = other DNA
gggtagataggtagatgg

SEQ ID NO: 1331 - DNA, 18 bp, synthetic construct
  source 1..18: mol_type = other DNA
ggatggatggatggatgg

SEQ ID NO: 1332 - DNA, 18 bp, synthetic construct
  source 1..18: mol_type = other DNA
atgtataggcagatggac

SEQ ID NO: 1333 - DNA, 18 bp, synthetic construct
  source 1..18: mol_type = other DNA
atggatgaatgggtgggt

SEQ ID NO: 1334 - DNA, 18 bp, synthetic construct
  source 1..18: mol_type = other DNA
atgaatggaaggatgtgt

SEQ ID NO: 1335 - DNA, 18 bp, synthetic construct
  source 1..18: mol_type = other DNA
tggttgaactattgcaag

SEQ ID NO: 1336 - DNA, 18 bp, synthetic construct
  source 1..18: mol_type = other DNA
caagtattgataattggg

SEQ ID NO: 1337 - DNA, 18 bp, synthetic construct
  source 1..18: mol_type = other DNA
tgggttcataatttctga

SEQ ID NO: 1338 - DNA, 18 bp, synthetic construct
  source 1..18: mol_type = other DNA
gaatatttagatggatgg

SEQ ID NO: 1339 - DNA, 18 bp, synthetic construct
  source 1..18: mol_type = other DNA
gtgagtggctggtggaca

SEQ ID NO: 1340 - DNA, 18 bp, synthetic construct
  source 1..18: mol_type = other DNA
cgaaaaatggatggttgg

SEQ ID NO: 1341 - DNA, 18 bp, synthetic construct
  source 1..18: mol_type = other DNA
aaattgatgggtggatgg

SEQ ID NO: 1342 - DNA, 18 bp, synthetic construct
  source 1..18: mol_type = other DNA
tggttggttgtatgaaag

SEQ ID NO: 1343 - DNA, 18 bp, synthetic construct
  source 1..18: mol_type = other DNA
atgaatgattgggtaggt

SEQ ID NO: 1344 - DNA, 18 bp, synthetic construct
  source 1..18: mol_type = other DNA
ggattaagttgcggatca

SEQ ID NO: 1345 - DNA, 18 bp, synthetic construct
  source 1..18: mol_type = other DNA
tgtatgggatggatgaat

SEQ ID NO: 1346 - DNA, 18 bp, synthetic construct
  source 1..18: mol_type = other DNA
atggatggatggatgtgt

SEQ ID NO: 1347 - DNA, 18 bp, synthetic construct
  source 1..18: mol_type = other DNA
gttgaattactgaaaggt

SEQ ID NO: 1348 - DNA, 18 bp, synthetic construct
  source 1..18: mol_type = other DNA
gaagagtggatgggtgaa

SEQ ID NO: 1349 - DNA, 18 bp, synthetic construct
  source 1..18: mol_type = other DNA
ttggggtagttagatggg

SEQ ID NO: 1350 - DNA, 18 bp, synthetic construct
  source 1..18: mol_type = other DNA
ggtgtgtggatggataaa

SEQ ID NO: 1351 - DNA, 18 bp, synthetic construct
  source 1..18: mol_type = other DNA
aagagtagatgaatgaat

SEQ ID NO: 1352 - DNA, 18 bp, synthetic construct
  source 1..18: mol_type = other DNA
atgaataaacaggcagat

SEQ ID NO: 1353 - DNA, 18 bp, synthetic construct
  source 1..18: mol_type = other DNA
atggatgatgtaagctgc

SEQ ID NO: 1354 - DNA, 18 bp, synthetic construct
  source 1..18: mol_type = other DNA
agctgccccagaccctgg

SEQ ID NO: 1355 - DNA, 18 bp, synthetic construct
  source 1..18: mol_type = other DNA
cctctgacccccggcgac

SEQ ID NO: 1356 - DNA, 18 bp, synthetic construct
  source 1..18: mol_type = other DNA
cttgcactctccatgaca

SEQ ID NO: 1357 - DNA, 18 bp, synthetic construct
  source 1..18: mol_type = other DNA
ttctctcccatggtggca

SEQ ID NO: 1358 - DNA, 18 bp, synthetic construct
  source 1..18: mol_type = other DNA
gtgagggtcattgctcgg

SEQ ID NO: 1359 - DNA, 18 bp, synthetic construct
  source 1..18: mol_type = other DNA
tgagggtcattgctcggc

SEQ ID NO: 1360 - DNA, 18 bp, synthetic construct
  source 1..18: mol_type = other DNA
gagggtcattgctcggcc

SEQ ID NO: 1361 - DNA, 18 bp, synthetic construct
  source 1..18: mol_type = other DNA
agggtcattgctcggccc

SEQ ID NO: 1362 - DNA, 18 bp, synthetic construct
  source 1..18: mol_type = other DNA
gggtcattgctcggcccc

SEQ ID NO: 1363 - DNA, 18 bp, synthetic construct
  source 1..18: mol_type = other DNA
ggtcattgctcggcccct

SEQ ID NO: 1364 - DNA, 18 bp, synthetic construct
  source 1..18: mol_type = other DNA
gtcattgctcggcccctc

SEQ ID NO: 1365 - DNA, 18 bp, synthetic construct
  source 1..18: mol_type = other DNA
tcattgctcggcccctcc

SEQ ID NO: 1366 - DNA, 18 bp, synthetic construct
  source 1..18: mol_type = other DNA
cattgctcggcccctccc

SEQ ID NO: 1367 - DNA, 18 bp, synthetic construct
  source 1..18: mol_type = other DNA
attgctcggcccctccca

SEQ ID NO: 1368 - DNA, 18 bp, synthetic construct
  source 1..18: mol_type = other DNA
ttgctcggcccctcccat

SEQ ID NO: 1369 - DNA, 18 bp, synthetic construct
  source 1..18: mol_type = other DNA
tgctcggcccctcccatg

SEQ ID NO: 1370 - DNA, 18 bp, synthetic construct
  source 1..18: mol_type = other DNA
gctcggcccctcccatgc

SEQ ID NO: 1371 - DNA, 18 bp, synthetic construct
  source 1..18: mol_type = other DNA
ctcggcccctcccatgcc

SEQ ID NO: 1372 - DNA, 18 bp, synthetic construct
  source 1..18: mol_type = other DNA
tcggcccctcccatgcca

SEQ ID NO: 1373 - DNA, 18 bp, synthetic construct
  source 1..18: mol_type = other DNA
cggcccctcccatgccac

SEQ ID NO: 1374 - DNA, 18 bp, synthetic construct
  source 1..18: mol_type = other DNA
gcccctcccatgccactt

SEQ ID NO: 1375 - DNA, 18 bp, synthetic construct
  source 1..18: mol_type = other DNA
cccctcccatgccacttc

SEQ ID NO: 1376 - DNA, 18 bp, synthetic construct
  source 1..18: mol_type = other DNA
ccctcccatgccacttcc

SEQ ID NO: 1377 - DNA, 18 bp, synthetic construct
  source 1..18: mol_type = other DNA
cctcccatgccacttcca

SEQ ID NO: 1378 - DNA, 18 bp, synthetic construct
  source 1..18: mol_type = other DNA
ctcccatgccacttccac

SEQ ID NO: 1379 - DNA, 18 bp, synthetic construct
  source 1..18: mol_type = other DNA
tcccatgccacttccact

SEQ ID NO: 1380 - DNA, 18 bp, synthetic construct
  source 1..18: mol_type = other DNA
cccatgccacttccactc

SEQ ID NO: 1381 - DNA, 18 bp, synthetic construct
  source 1..18: mol_type = other DNA
ccatgccacttccactca

SEQ ID NO: 1382 - DNA, 18 bp, synthetic construct
  source 1..18: mol_type = other DNA
catgccacttccactcac

SEQ ID NO: 1383 - DNA, 18 bp, synthetic construct
  source 1..18: mol_type = other DNA
atgccacttccactcacc

SEQ ID NO: 1384 - DNA, 18 bp, synthetic construct
  source 1..18: mol_type = other DNA
tgccacttccactcacca

SEQ ID NO: 1385 - DNA, 18 bp, synthetic construct
  source 1..18: mol_type = other DNA
gccacttccactcaccat

SEQ ID NO: 1386 - DNA, 18 bp, synthetic construct
  source 1..18: mol_type = other DNA
ccacttccactcaccatt

SEQ ID NO: 1387 - DNA, 18 bp, synthetic construct
  source 1..18: mol_type = other DNA
cacttccactcaccattc

SEQ ID NO: 1388 - DNA, 18 bp, synthetic construct
  source 1..18: mol_type = other DNA
cttccactcaccattcct

SEQ ID NO: 1389 - DNA, 18 bp, synthetic construct
  source 1..18: mol_type = other DNA
ttccactcaccattcctg

SEQ ID NO: 1390 - DNA, 18 bp, synthetic construct
  source 1..18: mol_type = other DNA
tccactcaccattcctgc

SEQ ID NO: 1391 - DNA, 18 bp, synthetic construct
  source 1..18: mol_type = other DNA
ccactcaccattcctgcc

SEQ ID NO: 1392 - DNA, 18 bp, synthetic construct
  source 1..18: mol_type = other DNA
cactcaccattcctgcct

SEQ ID NO: 1393 - DNA, 18 bp, synthetic construct
  source 1..18: mol_type = other DNA
actcaccattcctgcctg

SEQ ID NO: 1394 - DNA, 18 bp, synthetic construct
  source 1..18: mol_type = other DNA
ctcaccattcctgcctgc

SEQ ID NO: 1395 - DNA, 18 bp, synthetic construct
  source 1..18: mol_type = other DNA
tcaccattcctgcctgcc

SEQ ID NO: 1396 - DNA, 18 bp, synthetic construct
  source 1..18: mol_type = other DNA
caccattcctgcctgccc

SEQ ID NO: 1397 - DNA, 18 bp, synthetic construct
  source 1..18: mol_type = other DNA
accattcctgcctgccca

SEQ ID NO: 1398 - DNA, 18 bp, synthetic construct
  source 1..18: mol_type = other DNA
ccattcctgcctgcccag

SEQ ID NO: 1399 - DNA, 18 bp, synthetic construct
  source 1..18: mol_type = other DNA
cattcctgcctgcccagc

SEQ ID NO: 1400 - DNA, 18 bp, synthetic construct
  source 1..18: mol_type = other DNA
attcctgcctgcccagct

SEQ ID NO: 1401 - DNA, 18 bp, synthetic construct
  source 1..18: mol_type = other DNA
ttcctgcctgcccagctc

SEQ ID NO: 1402 - DNA, 18 bp, synthetic construct
  source 1..18: mol_type = other DNA
tcctgcctgcccagctct

SEQ ID NO: 1403 - DNA, 18 bp, synthetic construct
  source 1..18: mol_type = other DNA
cctgcctgcccagctctt

SEQ ID NO: 1404 - DNA, 18 bp, synthetic construct
  source 1..18: mol_type = other DNA
ctgcctgcccagctcttc

SEQ ID NO: 1405 - DNA, 18 bp, synthetic construct
  source 1..18: mol_type = other DNA
tgcctgcccagctcttcc

SEQ ID NO: 1406 - DNA, 18 bp, synthetic construct
  source 1..18: mol_type = other DNA
gcctgcccagctcttcct

SEQ ID NO: 1407 - DNA, 18 bp, synthetic construct
  source 1..18: mol_type = other DNA
ctgcccagctcttcctct

SEQ ID NO: 1408 - DNA, 18 bp, synthetic construct
  source 1..18: mol_type = other DNA
tgcccagctcttcctctt

SEQ ID NO: 1409 - DNA, 18 bp, synthetic construct
  source 1..18: mol_type = other DNA
gcccagctcttcctcttt

SEQ ID NO: 1410 - DNA, 18 bp, synthetic construct
  source 1..18: mol_type = other DNA
cccagctcttcctctttc

SEQ ID NO: 1411 - DNA, 18 bp, synthetic construct
  source 1..18: mol_type = other DNA
ccagctcttcctctttct

SEQ ID NO: 1412 - DNA, 18 bp, synthetic construct
  source 1..18: mol_type = other DNA
cagctcttcctctttctg

SEQ ID NO: 1413 - DNA, 18 bp, synthetic construct
  source 1..18: mol_type = other DNA
agctcttcctctttctgg

SEQ ID NO: 1414 - DNA, 18 bp, synthetic construct
  source 1..18: mol_type = other DNA
gctcttcctctttctggc

SEQ ID NO: 1415 - DNA, 18 bp, synthetic construct
  source 1..18: mol_type = other DNA
ctcttcctctttctggcc

SEQ ID NO: 1416 - DNA, 18 bp, synthetic construct
  source 1..18: mol_type = other DNA
tcttcctctttctggcca

SEQ ID NO: 1417 - DNA, 18 bp, synthetic construct
  source 1..18: mol_type = other DNA
cttcctctttctggccac

SEQ ID NO: 1418 - DNA, 18 bp, synthetic construct
  source 1..18: mol_type = other DNA
ttcctctttctggccaca

SEQ ID NO: 1419 - DNA, 18 bp, synthetic construct
  source 1..18: mol_type = other DNA
tcctctttctggccacac

SEQ ID NO: 1420 - DNA, 18 bp, synthetic construct
  source 1..18: mol_type = other DNA
cctctttctggccacacc

SEQ ID NO: 1421 - DNA, 18 bp, synthetic construct
  source 1..18: mol_type = other DNA
ctctttctggccacacca

SEQ ID NO: 1422 - DNA, 18 bp, synthetic construct
  source 1..18: mol_type = other DNA
tctttctggccacaccat

SEQ ID NO: 1423 - DNA, 18 bp, synthetic construct
  source 1..18: mol_type = other DNA
ctttctggccacaccatc

SEQ ID NO: 1424 - DNA, 18 bp, synthetic construct
  source 1..18: mol_type = other DNA
ttctggccacaccatcca

SEQ ID NO: 1425 - DNA, 18 bp, synthetic construct
  source 1..18: mol_type = other DNA
tctggccacaccatccac

SEQ ID NO: 1426 - DNA, 18 bp, synthetic construct
  source 1..18: mol_type = other DNA
ctggccacaccatccaca

SEQ ID NO: 1427 - DNA, 18 bp, synthetic construct
  source 1..18: mol_type = other DNA
tggccacaccatccacac

SEQ ID NO: 1428 - DNA, 18 bp, synthetic construct
  source 1..18: mol_type = other DNA
ggccacaccatccacact

SEQ ID NO: 1429 - DNA, 18 bp, synthetic construct
  source 1..18: mol_type = other DNA
gccacaccatccacactc

SEQ ID NO: 1430 - DNA, 18 bp, synthetic construct
  source 1..18: mol_type = other DNA
ccacaccatccacactct

SEQ ID NO: 1431 - DNA, 18 bp, synthetic construct
  source 1..18: mol_type = other DNA
cacaccatccacactctc

SEQ ID NO: 1432 - DNA, 18 bp, synthetic construct
  source 1..18: mol_type = other DNA
acaccatccacactctcc

SEQ ID NO: 1433 - DNA, 18 bp, synthetic construct
  source 1..18: mol_type = other DNA
caccatccacactctcct

SEQ ID NO: 1434 - DNA, 18 bp, synthetic construct
  source 1..18: mol_type = other DNA
accatccacactctcctg

SEQ ID NO: 1435 - DNA, 18 bp, synthetic construct
  source 1..18: mol_type = other DNA
ccatccacactctcctgg

SEQ ID NO: 1436 - DNA, 18 bp, synthetic construct
  source 1..18: mol_type = other DNA
catccacactctcctggc

SEQ ID NO: 1437 - DNA, 18 bp, synthetic construct
  source 1..18: mol_type = other DNA
atccacactctcctggcc

SEQ ID NO: 1438 - DNA, 18 bp, synthetic construct
  source 1..18: mol_type = other DNA
ccacactctcctggccct

SEQ ID NO: 1439 - DNA, 18 bp, synthetic construct
  source 1..18: mol_type = other DNA
cacactctcctggccctc

SEQ ID NO: 1440 - DNA, 18 bp, synthetic construct
  source 1..18: mol_type = other DNA
acactctcctggccctct

SEQ ID NO: 1441 - DNA, 18 bp, synthetic construct
  source 1..18: mol_type = other DNA
cactctcctggccctctg

SEQ ID NO: 1442 - DNA, 18 bp, synthetic construct
  source 1..18: mol_type = other DNA
actctcctggccctctga

SEQ ID NO: 1443 - DNA, 18 bp, synthetic construct
  source 1..18: mol_type = other DNA
ctctcctggccctctgag

SEQ ID NO: 1444 - DNA, 18 bp, synthetic construct
  source 1..18: mol_type = other DNA
tctcctggccctctgaga

SEQ ID NO: 1445 - DNA, 18 bp, synthetic construct
  source 1..18: mol_type = other DNA
ctcctggccctctgagac

SEQ ID NO: 1446 - DNA, 18 bp, synthetic construct
  source 1..18: mol_type = other DNA
tcctggccctctgagact

SEQ ID NO: 1447 - DNA, 18 bp, synthetic construct
  source 1..18: mol_type = other DNA
cctggccctctgagactg

SEQ ID NO: 1448 - DNA, 18 bp, synthetic construct
  source 1..18: mol_type = other DNA
ctggccctctgagactgc

SEQ ID NO: 1449 - DNA, 18 bp, synthetic construct
  source 1..18: mol_type = other DNA
tggccctctgagactgcc

SEQ ID NO: 1450 - DNA, 18 bp, synthetic construct
  source 1..18: mol_type = other DNA
ggccctctgagactgccc

SEQ ID NO: 1451 - DNA, 18 bp, synthetic construct
  source 1..18: mol_type = other DNA
gccctctgagactgcccg

SEQ ID NO: 1452 - DNA, 18 bp, synthetic construct
  source 1..18: mol_type = other DNA
cctctgagactgcccgcc

SEQ ID NO: 1453 - DNA, 18 bp, synthetic construct
  source 1..18: mol_type = other DNA
ctctgagactgcccgcca

SEQ ID NO: 1454 - DNA, 18 bp, synthetic construct
  source 1..18: mol_type = other DNA
tctgagactgcccgccat

SEQ ID NO: 1455 - DNA, 18 bp, synthetic construct
  source 1..18: mol_type = other DNA
ctgagactgcccgccatg

SEQ ID NO: 1456 - DNA, 18 bp, synthetic construct
  source 1..18: mol_type = other DNA
tgagactgcccgccatgc

SEQ ID NO: 1457 - DNA, 18 bp, synthetic construct
  source 1..18: mol_type = other DNA
gagactgcccgccatgcc

SEQ ID NO: 1458 - DNA, 18 bp, synthetic construct
  source 1..18: mol_type = other DNA
agactgcccgccatgcca

SEQ ID NO: 1459 - DNA, 18 bp, synthetic construct
  source 1..18: mol_type = other DNA
gactgcccgccatgccat

SEQ ID NO: 1460 - DNA, 18 bp, synthetic construct
  source 1..18: mol_type = other DNA
actgcccgccatgccatt

SEQ ID NO: 1461 - DNA, 18 bp, synthetic construct
  source 1..18: mol_type = other DNA
ctgcccgccatgccattc

SEQ ID NO: 1462 - DNA, 18 bp, synthetic construct
  source 1..18: mol_type = other DNA
tgcccgccatgccattcc

SEQ ID NO: 1463 - DNA, 18 bp, synthetic construct
  source 1..18: mol_type = other DNA
gcccgccatgccattccc

SEQ ID NO: 1464 - DNA, 18 bp, synthetic construct
  source 1..18: mol_type = other DNA
cccgccatgccattccct

SEQ ID NO: 1465 - DNA, 18 bp, synthetic construct
  source 1..18: mol_type = other DNA
cgccatgccattcccttt

SEQ ID NO: 1466 - DNA, 18 bp, synthetic construct
  source 1..18: mol_type = other DNA
gccatgccattcccttta

SEQ ID NO: 1467 - DNA, 18 bp, synthetic construct
  source 1..18: mol_type = other DNA
ccatgccattccctttac

SEQ ID NO: 1468 - DNA, 18 bp, synthetic construct
  source 1..18: mol_type = other DNA
catgccattccctttacc

SEQ ID NO: 1469 - DNA, 18 bp, synthetic construct
  source 1..18: mol_type = other DNA
atgccattccctttacct

SEQ ID NO: 1470 - DNA, 18 bp, synthetic construct
  source 1..18: mol_type = other DNA
tgccattccctttacctg

SEQ ID NO: 1471 - DNA, 18 bp, synthetic construct
  source 1..18: mol_type = other DNA
gccattccctttacctgg

SEQ ID NO: 1472 - DNA, 18 bp, synthetic construct
  source 1..18: mol_type = other DNA
ccattccctttacctgga

SEQ ID NO: 1473 - DNA, 18 bp, synthetic construct
  source 1..18: mol_type = other DNA
cattccctttacctggaa

SEQ ID NO: 1474 - DNA, 18 bp, synthetic construct
  source 1..18: mol_type = other DNA
attccctttacctggaaa

SEQ ID NO: 1475 - DNA, 18 bp, synthetic construct
  source 1..18: mol_type = other DNA
ttccctttacctggaaaa

SEQ ID NO: 1476 - DNA, 18 bp, synthetic construct
  source 1..18: mol_type = other DNA
tccctttacctggaaaac

SEQ ID NO: 1477 - DNA, 18 bp, synthetic construct
  source 1..18: mol_type = other DNA
ccctttacctggaaaact

SEQ ID NO: 1478 - DNA, 18 bp, synthetic construct
  source 1..18: mol_type = other DNA
cctttacctggaaaactc

SEQ ID NO: 1479 - DNA, 18 bp, synthetic construct
  source 1..18: mol_type = other DNA
ctttacctggaaaactcc

SEQ ID NO: 1480 - DNA, 18 bp, synthetic construct
  source 1..18: mol_type = other DNA
tttacctggaaaactcct

SEQ ID NO: 1481 - DNA, 18 bp, synthetic construct
  source 1..18: mol_type = other DNA
ttacctggaaaactcctc

SEQ ID NO: 1482 - DNA, 18 bp, synthetic construct
  source 1..18: mol_type = other DNA
tacctggaaaactcctcc

SEQ ID NO: 1483 - DNA, 18 bp, synthetic construct
  source 1..18: mol_type = other DNA
cctggaaaactcctccct

SEQ ID NO: 1484 - DNA, 18 bp, synthetic construct
  source 1..18: mol_type = other DNA
ctggaaaactcctcccta

SEQ ID NO: 1485 - DNA, 18 bp, synthetic construct
  source 1..18: mol_type = other DNA
tggaaaactcctccctat

SEQ ID NO: 1486 - DNA, 18 bp, synthetic construct
  source 1..18: mol_type = other DNA
ggaaaactcctccctatc

SEQ ID NO: 1487 - DNA, 18 bp, synthetic construct
  source 1..18: mol_type = other DNA
gaaaactcctccctatcc

SEQ ID NO: 1488 - DNA, 18 bp, synthetic construct
  source 1..18: mol_type = other DNA
aaaactcctccctatcca

SEQ ID NO: 1489 - DNA, 18 bp, synthetic construct
  source 1..18: mol_type = other DNA
aaactcctccctatccat

SEQ ID NO: 1490 - DNA, 18 bp, synthetic construct
  source 1..18: mol_type = other DNA
aactcctccctatccatc

SEQ ID NO: 1491 - DNA, 18 bp, synthetic construct
  source 1..18: mol_type = other DNA
actcctccctatccatca

SEQ ID NO: 1492 - DNA, 18 bp, synthetic construct
  source 1..18: mol_type = other DNA
ctcctccctatccatcaa

SEQ ID NO: 1493 - DNA, 18 bp, synthetic construct
  source 1..18: mol_type = other DNA
tcctccctatccatcaaa

SEQ ID NO: 1494 - DNA, 18 bp, synthetic construct
  source 1..18: mol_type = other DNA
cctccctatccatcaaag

SEQ ID NO: 1495 - DNA, 18 bp, synthetic construct
  source 1..18: mol_type = other DNA
ctccctatccatcaaagt

SEQ ID NO: 1496 - DNA, 18 bp, synthetic construct
  source 1..18: mol_type = other DNA
tccctatccatcaaagtc

SEQ ID NO: 1497 - DNA, 18 bp, synthetic construct
  source 1..18: mol_type = other DNA
cctatccatcaaagtcca

SEQ ID NO: 1498 - DNA, 18 bp, synthetic construct
  source 1..18: mol_type = other DNA
ctatccatcaaagtccag

SEQ ID NO: 1499 - DNA, 18 bp, synthetic construct
  source 1..18: mol_type = other DNA
tatccatcaaagtccaga

SEQ ID NO: 1500 - DNA, 18 bp, synthetic construct
  source 1..18: mol_type = other DNA
atccatcaaagtccagat

SEQ ID NO: 1501 - DNA, 18 bp, synthetic construct
  source 1..18: mol_type = other DNA
tccatcaaagtccagatt

SEQ ID NO: 1502 - DNA, 18 bp, synthetic construct
  source 1..18: mol_type = other DNA
ccatcaaagtccagattc

SEQ ID NO: 1503 - DNA, 18 bp, synthetic construct
  source 1..18: mol_type = other DNA
catcaaagtccagattca

SEQ ID NO: 1504 - DNA, 18 bp, synthetic construct
  source 1..18: mol_type = other DNA
atcaaagtccagattcag

SEQ ID NO: 1505 - DNA, 18 bp, synthetic construct
  source 1..18: mol_type = other DNA
tcaaagtccagattcagg

SEQ ID NO: 1506 - DNA, 18 bp, synthetic construct
  source 1..18: mol_type = other DNA
caaagtccagattcaggg

SEQ ID NO: 1507 - DNA, 18 bp, synthetic construct
  source 1..18: mol_type = other DNA
aaagtccagattcagggt

SEQ ID NO: 1508 - DNA, 18 bp, synthetic construct
  source 1..18: mol_type = other DNA
aagtccagattcagggtc

SEQ ID NO: 1509 - DNA, 18 bp, synthetic construct
  source 1..18: mol_type = other DNA
agtccagattcagggtca

SEQ ID NO: 1510 - DNA, 18 bp, synthetic construct
  source 1..18: mol_type = other DNA
gtccagattcagggtcac

SEQ ID NO: 1511 - DNA, 18 bp, synthetic construct
  source 1..18: mol_type = other DNA
tccagattcagggtcacc

SEQ ID NO: 1512 - DNA, 18 bp, synthetic construct
  source 1..18: mol_type = other DNA
ccagattcagggtcacct

SEQ ID NO: 1513 - DNA, 18 bp, synthetic construct
  source 1..18: mol_type = other DNA
cagattcagggtcacctc

SEQ ID NO: 1514 - DNA, 18 bp, synthetic construct
  source 1..18: mol_type = other DNA
gattcagggtcacctcct

SEQ ID NO: 1515 - DNA, 18 bp, synthetic construct
  source 1..18: mol_type = other DNA
attcagggtcacctcctc

SEQ ID NO: 1516 - DNA, 18 bp, synthetic construct
  source 1..18: mol_type = other DNA
ttcagggtcacctcctct

SEQ ID NO: 1517 - DNA, 18 bp, synthetic construct
  source 1..18: mol_type = other DNA
tcagggtcacctcctctg

SEQ ID NO: 1518 - DNA, 18 bp, synthetic construct
  source 1..18: mol_type = other DNA
cagggtcacctcctctgg

SEQ ID NO: 1519 - DNA, 18 bp, synthetic construct
  source 1..18: mol_type = other DNA
agggtcacctcctctggg

SEQ ID NO: 1520 - DNA, 18 bp, synthetic construct
  source 1..18: mol_type = other DNA
gggtcacctcctctggga

SEQ ID NO: 1521 - DNA, 18 bp, synthetic construct
  source 1..18: mol_type = other DNA
ggtcacctcctctgggaa

SEQ ID NO: 1522 - DNA, 18 bp, synthetic construct
  source 1..18: mol_type = other DNA
gtcacctcctctgggaag

SEQ ID NO: 1523 - DNA, 18 bp, synthetic construct
  source 1..18: mol_type = other DNA
tcacctcctctgggaagc

SEQ ID NO: 1524 - DNA, 18 bp, synthetic construct
  source 1..18: mol_type = other DNA
cacctcctctgggaagcc

SEQ ID NO: 1525 - DNA, 18 bp, synthetic construct
  source 1..18: mol_type = other DNA
acctcctctgggaagccc

SEQ ID NO: 1526 - DNA, 18 bp, synthetic construct
  source 1..18: mol_type = other DNA
cctcctctgggaagccca

SEQ ID NO: 1527 - DNA, 18 bp, synthetic construct
  source 1..18: mol_type = other DNA
ctcctctgggaagcccac

SEQ ID NO: 1528 - DNA, 18 bp, synthetic construct
  source 1..18: mol_type = other DNA
tcctctgggaagcccacc

SEQ ID NO: 1529 - DNA, 18 bp, synthetic construct
  source 1..18: mol_type = other DNA
ctctgggaagcccacctt

SEQ ID NO: 1530 - DNA, 18 bp, synthetic construct
  source 1..18: mol_type = other DNA
tctgggaagcccaccttg

SEQ ID NO: 1531 - DNA, 18 bp, synthetic construct
  source 1..18: mol_type = other DNA
ctgggaagcccaccttgg

SEQ ID NO: 1532 - DNA, 18 bp, synthetic construct
  source 1..18: mol_type = other DNA
tgggaagcccaccttggc

SEQ ID NO: 1533 - DNA, 18 bp, synthetic construct
  source 1..18: mol_type = other DNA
gggaagcccaccttggcc

SEQ ID NO: 1534 - DNA, 18 bp, synthetic construct
  source 1..18: mol_type = other DNA
ggaagcccaccttggcct

SEQ ID NO: 1535 - DNA, 18 bp, synthetic construct
  source 1..18: mol_type = other DNA
gaagcccaccttggcctc

SEQ ID NO: 1536 - DNA, 18 bp, synthetic construct
  source 1..18: mol_type = other DNA
aagcccaccttggcctcc

SEQ ID NO: 1537 - DNA, 18 bp, synthetic construct
  source 1..18: mol_type = other DNA
agcccaccttggcctcca

SEQ ID NO: 1538 - DNA, 18 bp, synthetic construct
  source 1..18: mol_type = other DNA
gcccaccttggcctccag

SEQ ID NO: 1539 - DNA, 18 bp, synthetic construct
  source 1..18: mol_type = other DNA
cccaccttggcctccagg

SEQ ID NO: 1540 - DNA, 18 bp, synthetic construct
  source 1..18: mol_type = other DNA
ccaccttggcctccaggt

SEQ ID NO: 1541 - DNA, 18 bp, synthetic construct
  source 1..18: mol_type = other DNA
caccttggcctccaggtt

SEQ ID NO: 1542 - DNA, 18 bp, synthetic construct
  source 1..18: mol_type = other DNA
accttggcctccaggttg

SEQ ID NO: 1543 - DNA, 18 bp, synthetic construct
  source 1..18: mol_type = other DNA
ccttggcctccaggttga

SEQ ID NO: 1544 - DNA, 18 bp, synthetic construct
  source 1..18: mol_type = other DNA
cttggcctccaggttgac

SEQ ID NO: 1545 - DNA, 18 bp, synthetic construct
  source 1..18: mol_type = other DNA
tggcctccaggttgactc

SEQ ID NO: 1546 - DNA, 18 bp, synthetic construct
  source 1..18: mol_type = other DNA
ggcctccaggttgactct

SEQ ID NO: 1547 - DNA, 18 bp, synthetic construct
  source 1..18: mol_type = other DNA
gcctccaggttgactctc

SEQ ID NO: 1548 - DNA, 18 bp, synthetic construct
  source 1..18: mol_type = other DNA
cctccaggttgactctca

SEQ ID NO: 1549 - DNA, 18 bp, synthetic construct
  source 1..18: mol_type = other DNA
ctccaggttgactctcac

SEQ ID NO: 1550 - DNA, 18 bp, synthetic construct
  source 1..18: mol_type = other DNA
tccaggttgactctcact

SEQ ID NO: 1551 - DNA, 18 bp, synthetic construct
  source 1..18: mol_type = other DNA
ccaggttgactctcacta

SEQ ID NO: 1552 - DNA, 18 bp, synthetic construct
  source 1..18: mol_type = other DNA
caggttgactctcactac

SEQ ID NO: 1553 - DNA, 18 bp, synthetic construct
  source 1..18: mol_type = other DNA
aggttgactctcactact

SEQ ID NO: 1554 - DNA, 18 bp, synthetic construct
  source 1..18: mol_type = other DNA
gttgactctcactactca

SEQ ID NO: 1555 - DNA, 18 bp, synthetic construct
  source 1..18: mol_type = other DNA
ttgactctcactactcat

SEQ ID NO: 1556 - DNA, 18 bp, synthetic construct
  source 1..18: mol_type = other DNA
tgactctcactactcatc

SEQ ID NO: 1557 - DNA, 18 bp, synthetic construct
  source 1..18: mol_type = other DNA
gactctcactactcatca

SEQ ID NO: 1558 - DNA, 18 bp, synthetic construct
  source 1..18: mol_type = other DNA
actctcactactcatcat

SEQ ID NO: 1559 - DNA, 18 bp, synthetic construct
  source 1..18: mol_type = other DNA
ctctcactactcatcatc

SEQ ID NO: 1560 - DNA, 18 bp, synthetic construct
  source 1..18: mol_type = other DNA
tctcactactcatcatca

SEQ ID NO: 1561 - DNA, 18 bp, synthetic construct
  source 1..18: mol_type = other DNA
ctcactactcatcatcag

SEQ ID NO: 1562 - DNA, 18 bp, synthetic construct
  source 1..18: mol_type = other DNA
tcactactcatcatcagg

SEQ ID NO: 1563 - DNA, 18 bp, synthetic construct
  source 1..18: mol_type = other DNA
cactactcatcatcaggt

SEQ ID NO: 1564 - DNA, 18 bp, synthetic construct
  source 1..18: mol_type = other DNA
actactcatcatcaggtt

SEQ ID NO: 1565 - DNA, 18 bp, synthetic construct
  source 1..18: mol_type = other DNA
tactcatcatcaggttct

SEQ ID NO: 1566 - DNA, 18 bp, synthetic construct
  source 1..18: mol_type = other DNA
actcatcatcaggttctt

SEQ ID NO: 1567 - DNA, 18 bp, synthetic construct
  source 1..18: mol_type = other DNA
ctcatcatcaggttcttc

SEQ ID NO: 1568 - DNA, 18 bp, synthetic construct
  source 1..18: mol_type = other DNA
tcatcatcaggttcttcc

SEQ ID NO: 1569 - DNA, 18 bp, synthetic construct
  source 1..18: mol_type = other DNA
catcatcaggttcttcct

SEQ ID NO: 1570 - DNA, 18 bp, synthetic construct
  source 1..18: mol_type = other DNA
atcatcaggttcttcctt

SEQ ID NO: 1571 - DNA, 18 bp, synthetic construct
  source 1..18: mol_type = other DNA
tcatcaggttcttccttc

SEQ ID NO: 1572 - DNA, 18 bp, synthetic construct
  source 1..18: mol_type = other DNA
catcaggttcttccttct

SEQ ID NO: 1573 - DNA, 18 bp, synthetic construct
  source 1..18: mol_type = other DNA
atcaggttcttccttcta

SEQ ID NO: 1574 - DNA, 18 bp, synthetic construct
  source 1..18: mol_type = other DNA
tcaggttcttccttctat

SEQ ID NO: 1575 - DNA, 18 bp, synthetic construct
  source 1..18: mol_type = other DNA
caggttcttccttctatt

SEQ ID NO: 1576 - DNA, 18 bp, synthetic construct
  source 1..18: mol_type = other DNA
aggttcttccttctattc

SEQ ID NO: 1577 - DNA, 18 bp, synthetic construct
  source 1..18: mol_type = other DNA
ggttcttccttctattcc

SEQ ID NO: 1578 - DNA, 18 bp, synthetic construct
  source 1..18: mol_type = other DNA
gttcttccttctattcca

SEQ ID NO: 1579 - DNA, 18 bp, synthetic construct
  source 1..18: mol_type = other DNA
ttcttccttctattccag

SEQ ID NO: 1580 - DNA, 18 bp, synthetic construct
  source 1..18: mol_type = other DNA
tcttccttctattccagc

SEQ ID NO: 1581 - DNA, 18 bp, synthetic construct
  source 1..18: mol_type = other DNA
cttccttctattccagcc

SEQ ID NO: 1582 - DNA, 18 bp, synthetic construct
  source 1..18: mol_type = other DNA
tccttctattccagccct

SEQ ID NO: 1583 - DNA, 18 bp, synthetic construct
  source 1..18: mol_type = other DNA
ccttctattccagcccta

SEQ ID NO: 1584 - DNA, 18 bp, synthetic construct
  source 1..18: mol_type = other DNA
cttctattccagccctaa

SEQ ID NO: 1585 - DNA, 18 bp, synthetic construct
  source 1..18: mol_type = other DNA
ttctattccagccctaac

SEQ ID NO: 1586 - DNA, 18 bp, synthetic construct
  source 1..18: mol_type = other DNA
tctattccagccctaacc

SEQ ID NO: 1587 - DNA, 18 bp, synthetic construct
  source 1..18: mol_type = other DNA
ctattccagccctaacca

SEQ ID NO: 1588 - DNA, 18 bp, synthetic construct
  source 1..18: mol_type = other DNA
tattccagccctaaccac

SEQ ID NO: 1589 - DNA, 18 bp, synthetic construct
  source 1..18: mol_type = other DNA
attccagccctaaccact

SEQ ID NO: 1590 - DNA, 18 bp, synthetic construct
  source 1..18: mol_type = other DNA
ttccagccctaaccactc

SEQ ID NO: 1591 - DNA, 18 bp, synthetic construct
  source 1..18: mol_type = other DNA
tccagccctaaccactca

SEQ ID NO: 1592 - DNA, 18 bp, synthetic construct
  source 1..18: mol_type = other DNA
ccagccctaaccactcag

SEQ ID NO: 1593 - DNA, 18 bp, synthetic construct
  source 1..18: mol_type = other DNA
cagccctaaccactcagg

SEQ ID NO: 1594 - DNA, 18 bp, synthetic construct
  source 1..18: mol_type = other DNA
agccctaaccactcagga

SEQ ID NO: 1595 - DNA, 18 bp, synthetic construct
  source 1..18: mol_type = other DNA
gccctaaccactcaggat

SEQ ID NO: 1596 - DNA, 18 bp, synthetic construct
  source 1..18: mol_type = other DNA
ccctaaccactcaggatt

SEQ ID NO: 1597 - DNA, 18 bp, synthetic construct
  source 1..18: mol_type = other DNA
cctaaccactcaggattg

SEQ ID NO: 1598 - DNA, 18 bp, synthetic construct
  source 1..18: mol_type = other DNA
taaccactcaggattggg

SEQ ID NO: 1599 - DNA, 18 bp, synthetic construct
  source 1..18: mol_type = other DNA
aaccactcaggattgggc

SEQ ID NO: 1600 - DNA, 18 bp, synthetic construct
  source 1..18: mol_type = other DNA
accactcaggattgggcc

SEQ ID NO: 1601 - DNA, 18 bp, synthetic construct
  source 1..18: mol_type = other DNA
ccactcaggattgggccg

SEQ ID NO: 1602 - DNA, 18 bp, synthetic construct
  source 1..18: mol_type = other DNA
cactcaggattgggccgt

SEQ ID NO: 1603 - DNA, 18 bp, synthetic construct
  source 1..18: mol_type = other DNA
actcaggattgggccgtt

SEQ ID NO: 1604 - DNA, 18 bp, synthetic construct
  source 1..18: mol_type = other DNA
ctcaggattgggccgttt

SEQ ID NO: 1605 - DNA, 18 bp, synthetic construct
  source 1..18: mol_type = other DNA
tcaggattgggccgtttg

SEQ ID NO: 1606 - DNA, 18 bp, synthetic construct
  source 1..18: mol_type = other DNA
caggattgggccgtttgt

SEQ ID NO: 1607 - DNA, 18 bp, synthetic construct
  source 1..18: mol_type = other DNA
aggattgggccgtttgtg

SEQ ID NO: 1608 - DNA, 18 bp, synthetic construct
  source 1..18: mol_type = other DNA
ggattgggccgtttgtgt

SEQ ID NO: 1609 - DNA, 18 bp, synthetic construct
  source 1..18: mol_type = other DNA
gattgggccgtttgtgtc

SEQ ID NO: 1610 - DNA, 18 bp, synthetic construct
  source 1..18: mol_type = other DNA
attgggccgtttgtgtct

SEQ ID NO: 1611 - DNA, 18 bp, synthetic construct
  source 1..18: mol_type = other DNA
ttgggccgtttgtgtctg

SEQ ID NO: 1612 - DNA, 18 bp, synthetic construct
  source 1..18: mol_type = other DNA
tgggccgtttgtgtctgg

SEQ ID NO: 1613 - DNA, 18 bp, synthetic construct
  source 1..18: mol_type = other DNA
ggccgtttgtgtctgggt

SEQ ID NO: 1614 - DNA, 18 bp, synthetic construct
  source 1..18: mol_type = other DNA
gccgtttgtgtctgggta

SEQ ID NO: 1615 - DNA, 18 bp, synthetic construct
  source 1..18: mol_type = other DNA
ccgtttgtgtctgggtat

SEQ ID NO: 1616 - DNA, 18 bp, synthetic construct
  source 1..18: mol_type = other DNA
cgtttgtgtctgggtatg

SEQ ID NO: 1617 - DNA, 18 bp, synthetic construct
  source 1..18: mol_type = other DNA
gtttgtgtctgggtatgt

SEQ ID NO: 1618 - DNA, 18 bp, synthetic construct
  source 1..18: mol_type = other DNA
tttgtgtctgggtatgtc

SEQ ID NO: 1619 - DNA, 18 bp, synthetic construct
  source 1..18: mol_type = other DNA
ttgtgtctgggtatgtct

SEQ ID NO: 1620 - DNA, 18 bp, synthetic construct
  source 1..18: mol_type = other DNA
tgtgtctgggtatgtctc

SEQ ID NO: 1621 - DNA, 18 bp, synthetic construct
  source 1..18: mol_type = other DNA
gtgtctgggtatgtctct

SEQ ID NO: 1622 - DNA, 18 bp, synthetic construct
  source 1..18: mol_type = other DNA
tgtctgggtatgtctctt

SEQ ID NO: 1623 - DNA, 18 bp, synthetic construct
  source 1..18: mol_type = other DNA
gtctgggtatgtctcttc

SEQ ID NO: 1624 - DNA, 18 bp, synthetic construct
  source 1..18: mol_type = other DNA
tctgggtatgtctcttcc

SEQ ID NO: 1625 - DNA, 18 bp, synthetic construct
  source 1..18: mol_type = other DNA
ctgggtatgtctcttcca

SEQ ID NO: 1626 - DNA, 18 bp, synthetic construct
  source 1..18: mol_type = other DNA
tgggtatgtctcttccag

SEQ ID NO: 1627 - DNA, 18 bp, synthetic construct
  source 1..18: mol_type = other DNA
gggtatgtctcttccagc

SEQ ID NO: 1628 - DNA, 18 bp, synthetic construct
  source 1..18: mol_type = other DNA
ggtatgtctcttccagct

SEQ ID NO: 1629 - DNA, 18 bp, synthetic construct
  source 1..18: mol_type = other DNA
gtatgtctcttccagctg

SEQ ID NO: 1630 - DNA, 18 bp, synthetic construct
  source 1..18: mol_type = other DNA
tatgtctcttccagctgc

SEQ ID NO: 1631 - DNA, 18 bp, synthetic construct
  source 1..18: mol_type = other DNA
tgtctcttccagctgcct

SEQ ID NO: 1632 - DNA, 18 bp, synthetic construct
  source 1..18: mol_type = other DNA
gtctcttccagctgcctg

SEQ ID NO: 1633 - DNA, 18 bp, synthetic construct
  source 1..18: mol_type = other DNA
tctcttccagctgcctgg

SEQ ID NO: 1634 - DNA, 18 bp, synthetic construct
  source 1..18: mol_type = other DNA
ctcttccagctgcctggg

SEQ ID NO: 1635 - DNA, 18 bp, synthetic construct
  source 1..18: mol_type = other DNA
tcttccagctgcctgggt

SEQ ID NO: 1636 - DNA, 18 bp, synthetic construct
  source 1..18: mol_type = other DNA
cttccagctgcctgggtt

SEQ ID NO: 1637 - DNA, 18 bp, synthetic construct
  source 1..18: mol_type = other DNA
ttccagctgcctgggttt

SEQ ID NO: 1638 - DNA, 18 bp, synthetic construct
  source 1..18: mol_type = other DNA
tccagctgcctgggtttc

SEQ ID NO: 1639 - DNA, 18 bp, synthetic construct
  source 1..18: mol_type = other DNA
ccagctgcctgggtttcc

SEQ ID NO: 1640 - DNA, 18 bp, synthetic construct
  source 1..18: mol_type = other DNA
cagctgcctgggtttcct

SEQ ID NO: 1641 - DNA, 18 bp, synthetic construct
  source 1..18: mol_type = other DNA
agctgcctgggtttcctg

SEQ ID NO: 1642 - DNA, 18 bp, synthetic construct
  source 1..18: mol_type = other DNA
gctgcctgggtttcctgg

SEQ ID NO: 1643 - DNA, 18 bp, synthetic construct
  source 1..18: mol_type = other DNA
ctgcctgggtttcctgga

SEQ ID NO: 1644 - DNA, 18 bp, synthetic construct
  source 1..18: mol_type = other DNA
tgcctgggtttcctggaa

SEQ ID NO: 1645 - DNA, 18 bp, synthetic construct
  source 1..18: mol_type = other DNA
gcctgggtttcctggaaa

SEQ ID NO: 1646 - DNA, 18 bp, synthetic construct
  source 1..18: mol_type = other DNA
cctgggtttcctggaaag

SEQ ID NO: 1647 - DNA, 18 bp, synthetic construct
  source 1..18: mol_type = other DNA
ctgggtttcctggaaaga

SEQ ID NO: 1648 - DNA, 18 bp, synthetic construct
  source 1..18: mol_type = other DNA
tgggtttcctggaaagaa

SEQ ID NO: 1649 - DNA, 18 bp, synthetic construct
  source 1..18: mol_type = other DNA
ggtttcctggaaagaact

SEQ ID NO: 1650 - DNA, 18 bp, synthetic construct
  source 1..18: mol_type = other DNA
gtttcctggaaagaactc

SEQ ID NO: 1651 - DNA, 18 bp, synthetic construct
  source 1..18: mol_type = other DNA
tttcctggaaagaactct

SEQ ID NO: 1652 - DNA, 18 bp, synthetic construct
  source 1..18: mol_type = other DNA
ttcctggaaagaactctt

SEQ ID NO: 1653 - DNA, 18 bp, synthetic construct
  source 1..18: mol_type = other DNA
tcctggaaagaactctta

SEQ ID NO: 1654 - DNA, 18 bp, synthetic construct
  source 1..18: mol_type = other DNA
cctggaaagaactcttat

SEQ ID NO: 1655 - DNA, 18 bp, synthetic construct
  source 1..18: mol_type = other DNA
ctggaaagaactcttatc

SEQ ID NO: 1656 - DNA, 18 bp, synthetic construct
  source 1..18: mol_type = other DNA
tggaaagaactcttatcc

SEQ ID NO: 1657 - DNA, 18 bp, synthetic construct
  source 1..18: mol_type = other DNA
ggaaagaactcttatccc

SEQ ID NO: 1658 - DNA, 18 bp, synthetic construct
  source 1..18: mol_type = other DNA
gaaagaactcttatcccc

SEQ ID NO: 1659 - DNA, 18 bp, synthetic construct
  source 1..18: mol_type = other DNA
aaagaactcttatcccca

SEQ ID NO: 1660 - DNA, 18 bp, synthetic construct
  source 1..18: mol_type = other DNA
aagaactcttatccccag

SEQ ID NO: 1661 - DNA, 18 bp, synthetic construct
  source 1..18: mol_type = other DNA
agaactcttatccccagg

SEQ ID NO: 1662 - DNA, 18 bp, synthetic construct
  source 1..18: mol_type = other DNA
gaactcttatccccagga

SEQ ID NO: 1663 - DNA, 18 bp, synthetic construct
  source 1..18: mol_type = other DNA
aactcttatccccaggaa

SEQ ID NO: 1664 - DNA, 18 bp, synthetic construct
  source 1..18: mol_type = other DNA
ctcttatccccaggaact

SEQ ID NO: 1665 - DNA, 18 bp, synthetic construct
  source 1..18: mol_type = other DNA
tcttatccccaggaacta

SEQ ID NO: 1666 - DNA, 18 bp, synthetic construct
  source 1..18: mol_type = other DNA
cttatccccaggaactag

SEQ ID NO: 1667 - DNA, 18 bp, synthetic construct
  source 1..18: mol_type = other DNA
ttatccccaggaactagt

SEQ ID NO: 1668 - DNA, 18 bp, synthetic construct
  source 1..18: mol_type = other DNA
tatccccaggaactagtt

SEQ ID NO: 1669 - DNA, 18 bp, synthetic construct
  source 1..18: mol_type = other DNA
atccccaggaactagttt

SEQ ID NO: 1670 - DNA, 18 bp, synthetic construct
  source 1..18: mol_type = other DNA
tccccaggaactagtttg

SEQ ID NO: 1671 - DNA, 18 bp, synthetic construct
  source 1..18: mol_type = other DNA
ccccaggaactagtttgt

SEQ ID NO: 1672 - DNA, 18 bp, synthetic construct
  source 1..18: mol_type = other DNA
cccaggaactagtttgtt

SEQ ID NO: 1673 - DNA, 18 bp, synthetic construct
  source 1..18: mol_type = other DNA
ccaggaactagtttgttg

SEQ ID NO: 1674 - DNA, 18 bp, synthetic construct
  source 1..18: mol_type = other DNA
caggaactagtttgttga

SEQ ID NO: 1675 - DNA, 18 bp, synthetic construct
  source 1..18: mol_type = other DNA
aggaactagtttgttgaa

SEQ ID NO: 1676 - DNA, 18 bp, synthetic construct
  source 1..18: mol_type = other DNA
ggaactagtttgttgaat

SEQ ID NO: 1677 - DNA, 18 bp, synthetic construct
  source 1..18: mol_type = other DNA
aactagtttgttgaataa

SEQ ID NO: 1678 - DNA, 18 bp, synthetic construct
  source 1..18: mol_type = other DNA
actagtttgttgaataaa

SEQ ID NO: 1679 - DNA, 18 bp, synthetic construct
  source 1..18: mol_type = other DNA
ctagtttgttgaataaat

SEQ ID NO: 1680 - DNA, 18 bp, synthetic construct
  source 1..18: mol_type = other DNA
tagtttgttgaataaatg

SEQ ID NO: 1681 - DNA, 18 bp, synthetic construct
  source 1..18: mol_type = other DNA
agtttgttgaataaatgc

SEQ ID NO: 1682 - DNA, 18 bp, synthetic construct
  source 1..18: mol_type = other DNA
gtttgttgaataaatgct

SEQ ID NO: 1683 - DNA, 18 bp, synthetic construct
  source 1..18: mol_type = other DNA
tttgttgaataaatgctg

SEQ ID NO: 1684 - DNA, 18 bp, synthetic construct
  source 1..18: mol_type = other DNA
ttgttgaataaatgctgg

SEQ ID NO: 1685 - DNA, 18 bp, synthetic construct
  source 1..18: mol_type = other DNA
tgttgaataaatgctggt

SEQ ID NO: 1686 - DNA, 18 bp, synthetic construct
  source 1..18: mol_type = other DNA
gttgaataaatgctggtg

SEQ ID NO: 1687 - DNA, 18 bp, synthetic construct
  source 1..18: mol_type = other DNA
ttgaataaatgctggtga

SEQ ID NO: 1688 - DNA, 18 bp, synthetic construct
  source 1..18: mol_type = other DNA
tgaataaatgctggtgaa

SEQ ID NO: 1689 - DNA, 18 bp, synthetic construct
  source 1..18: mol_type = other DNA
gaataaatgctggtgaat

SEQ ID NO: 1690 - DNA, 18 bp, synthetic construct
  source 1..18: mol_type = other DNA
aataaatgctggtgaatg

SEQ ID NO: 1691 - DNA, 18 bp, synthetic construct
  source 1..18: mol_type = other DNA
ataaatgctggtgaatga

SEQ ID NO: 1692 - DNA, 18 bp, synthetic construct
  source 1..18: mol_type = other DNA
taaatgctggtgaatgaa

SEQ ID NO: 1693 - DNA, 18 bp, synthetic construct
  source 1..18: mol_type = other DNA
aaatgctggtgaatgaat

SEQ ID NO: 1694 - DNA, 18 bp, synthetic construct
  source 1..18: mol_type = other DNA
aatgctggtgaatgaatg

SEQ ID NO: 1695 - DNA, 18 bp, synthetic construct
  source 1..18: mol_type = other DNA
tgctggtgaatgaatgaa

SEQ ID NO: 1696 - DNA, 18 bp, synthetic construct
  source 1..18: mol_type = other DNA
gctggtgaatgaatgaat

SEQ ID NO: 1697 - DNA, 18 bp, synthetic construct
  source 1..18: mol_type = other DNA
ctggtgaatgaatgaatg

SEQ ID NO: 1698 - DNA, 18 bp, synthetic construct
  source 1..18: mol_type = other DNA
tggtgaatgaatgaatga

SEQ ID NO: 1699 - DNA, 18 bp, synthetic construct
  source 1..18: mol_type = other DNA
ggtgaatgaatgaatgat

SEQ ID NO: 1700 - DNA, 18 bp, synthetic construct
  source 1..18: mol_type = other DNA
gtgaatgaatgaatgatt

SEQ ID NO: 1701 - DNA, 18 bp, synthetic construct
  source 1..18: mol_type = other DNA
tgaatgaatgaatgattg

SEQ ID NO: 1702 - DNA, 18 bp, synthetic construct
  source 1..18: mol_type = other DNA
gaatgaatgaatgattga

SEQ ID NO: 1703 - DNA, 18 bp, synthetic construct
  source 1..18: mol_type = other DNA
aatgaatgaatgattgaa

SEQ ID NO: 1704 - DNA, 18 bp, synthetic construct
  source 1..18: mol_type = other DNA
atgaatgaatgattgaac

SEQ ID NO: 1705 - DNA, 18 bp, synthetic construct
  source 1..18: mol_type = other DNA
tgaatgaatgattgaaca

SEQ ID NO: 1706 - DNA, 18 bp, synthetic construct
  source 1..18: mol_type = other DNA
gaatgaatgattgaacag

SEQ ID NO: 1707 - DNA, 18 bp, synthetic construct
  source 1..18: mol_type = other DNA
aatgaatgattgaacaga

SEQ ID NO: 1708 - DNA, 18 bp, synthetic construct
  source 1..18: mol_type = other DNA
atgaatgattgaacagat

SEQ ID NO: 1709 - DNA, 18 bp, synthetic construct
  source 1..18: mol_type = other DNA
gaatgattgaacagatga

SEQ ID NO: 1710 - DNA, 18 bp, synthetic construct
  source 1..18: mol_type = other DNA
aatgattgaacagatgaa

SEQ ID NO: 1711 - DNA, 18 bp, synthetic construct
  source 1..18: mol_type = other DNA
atgattgaacagatgaat

SEQ ID NO: 1712 - DNA, 18 bp, synthetic construct
  source 1..18: mol_type = other DNA
tgattgaacagatgaatg

SEQ ID NO: 1713 - DNA, 18 bp, synthetic construct
  source 1..18: mol_type = other DNA
gattgaacagatgaatga

SEQ ID NO: 1714 - DNA, 18 bp, synthetic construct
  source 1..18: mol_type = other DNA
attgaacagatgaatgag

SEQ ID NO: 1715 - DNA, 18 bp, synthetic construct
  source 1..18: mol_type = other DNA
ttgaacagatgaatgagt

SEQ ID NO: 1716 - DNA, 18 bp, synthetic construct
  source 1..18: mol_type = other DNA
tgaacagatgaatgagtg

SEQ ID NO: 1717 - DNA, 18 bp, synthetic construct
  source 1..18: mol_type = other DNA
gaacagatgaatgagtga

SEQ ID NO: 1718 - DNA, 18 bp, synthetic construct
  source 1..18: mol_type = other DNA
aacagatgaatgagtgat

SEQ ID NO: 1719 - DNA, 18 bp, synthetic construct
  source 1..18: mol_type = other DNA
acagatgaatgagtgatg

SEQ ID NO: 1720 - DNA, 18 bp, synthetic construct
  source 1..18: mol_type = other DNA
cagatgaatgagtgatga

SEQ ID NO: 1721 - DNA, 18 bp, synthetic construct
  source 1..18: mol_type = other DNA
agatgaatgagtgatgag

SEQ ID NO: 1722 - DNA, 18 bp, synthetic construct
  source 1..18: mol_type = other DNA
gatgaatgagtgatgagt

SEQ ID NO: 1723 - DNA, 18 bp, synthetic construct
  source 1..18: mol_type = other DNA
atgaatgagtgatgagta

SEQ ID NO: 1724 - DNA, 18 bp, synthetic construct
  source 1..18: mol_type = other DNA
gaatgagtgatgagtaga

SEQ ID NO: 1725 - DNA, 18 bp, synthetic construct
  source 1..18: mol_type = other DNA
aatgagtgatgagtagat

SEQ ID NO: 1726 - DNA, 18 bp, synthetic construct
  source 1..18: mol_type = other DNA
atgagtgatgagtagata

SEQ ID NO: 1727 - DNA, 18 bp, synthetic construct
  source 1..18: mol_type = other DNA
tgagtgatgagtagataa

SEQ ID NO: 1728 - DNA, 18 bp, synthetic construct
  source 1..18: mol_type = other DNA
gagtgatgagtagataaa

SEQ ID NO: 1729 - DNA, 18 bp, synthetic construct
  source 1..18: mol_type = other DNA
agtgatgagtagataaaa

SEQ ID NO: 1730 - DNA, 18 bp, synthetic construct
  source 1..18: mol_type = other DNA
gtgatgagtagataaaag

SEQ ID NO: 1731 - DNA, 18 bp, synthetic construct
  source 1..18: mol_type = other DNA
tgatgagtagataaaagg

SEQ ID NO: 1732 - DNA, 18 bp, synthetic construct
  source 1..18: mol_type = other DNA
gatgagtagataaaagga

SEQ ID NO: 1733 - DNA, 18 bp, synthetic construct
  source 1..18: mol_type = other DNA
atgagtagataaaaggat

SEQ ID NO: 1734 - DNA, 18 bp, synthetic construct
  source 1..18: mol_type = other DNA
tgagtagataaaaggatg

SEQ ID NO: 1735 - DNA, 18 bp, synthetic construct
  source 1..18: mol_type = other DNA
gagtagataaaaggatgg

SEQ ID NO: 1736 - DNA, 18 bp, synthetic construct
  source 1..18: mol_type = other DNA
agtagataaaaggatgga

SEQ ID NO: 1737 - DNA, 18 bp, synthetic construct
  source 1..18: mol_type = other DNA
gtagataaaaggatggat

SEQ ID NO: 1738 - DNA, 18 bp, synthetic construct
  source 1..18: mol_type = other DNA
tagataaaaggatggatg

SEQ ID NO: 1739 - DNA, 18 bp, synthetic construct
  source 1..18: mol_type = other DNA
agataaaaggatggatgg

SEQ ID NO: 1740 - DNA, 18 bp, synthetic construct
  source 1..18: mol_type = other DNA
gataaaaggatggatgga

SEQ ID NO: 1741 - DNA, 18 bp, synthetic construct
  source 1..18: mol_type = other DNA
ataaaaggatggatggag

SEQ ID NO: 1742 - DNA, 18 bp, synthetic construct
  source 1..18: mol_type = other DNA
aaaaggatggatggagag

SEQ ID NO: 1743 - DNA, 18 bp, synthetic construct
  source 1..18: mol_type = other DNA
aaaggatggatggagaga

SEQ ID NO: 1744 - DNA, 18 bp, synthetic construct
  source 1..18: mol_type = other DNA
aaggatggatggagagat

SEQ ID NO: 1745 - DNA, 18 bp, synthetic construct
  source 1..18: mol_type = other DNA
aggatggatggagagatg

SEQ ID NO: 1746 - DNA, 18 bp, synthetic construct
  source 1..18: mol_type = other DNA
ggatggatggagagatgg

SEQ ID NO: 1747 - DNA, 18 bp, synthetic construct
  source 1..18: mol_type = other DNA
gatggatggagagatggg

SEQ ID NO: 1748 - DNA, 18 bp, synthetic construct
  source 1..18: mol_type = other DNA
atggatggagagatgggt

SEQ ID NO: 1749 - DNA, 18 bp, synthetic construct
  source 1..18: mol_type = other DNA
tggatggagagatgggtg

SEQ ID NO: 1750 - DNA, 18 bp, synthetic construct
  source 1..18: mol_type = other DNA
ggatggagagatgggtga

SEQ ID NO: 1751 - DNA, 18 bp, synthetic construct
  source 1..18: mol_type = other DNA
gatggagagatgggtgag

SEQ ID NO: 1752 - DNA, 18 bp, synthetic construct
  source 1..18: mol_type = other DNA
atggagagatgggtgagt

SEQ ID NO: 1753 - DNA, 18 bp, synthetic construct
  source 1..18: mol_type = other DNA
tggagagatgggtgagta

SEQ ID NO: 1754 - DNA, 18 bp, synthetic construct
  source 1..18: mol_type = other DNA
ggagagatgggtgagtac

SEQ ID NO: 1755 - DNA, 18 bp, synthetic construct
  source 1..18: mol_type = other DNA
gagagatgggtgagtaca

SEQ ID NO: 1756 - DNA, 18 bp, synthetic construct
  source 1..18: mol_type = other DNA
gagatgggtgagtacatg

SEQ ID NO: 1757 - DNA, 18 bp, synthetic construct
  source 1..18: mol_type = other DNA
agatgggtgagtacatgg

SEQ ID NO: 1758 - DNA, 18 bp, synthetic construct
  source 1..18: mol_type = other DNA
gatgggtgagtacatgga

SEQ ID NO: 1759 - DNA, 18 bp, synthetic construct
  source 1..18: mol_type = other DNA
atgggtgagtacatggat

SEQ ID NO: 1760 - DNA, 18 bp, synthetic construct
  source 1..18: mol_type = other DNA
tgggtgagtacatggatg

SEQ ID NO: 1761 - DNA, 18 bp, synthetic construct
  source 1..18: mol_type = other DNA
gggtgagtacatggatgg

SEQ ID NO: 1762 - DNA, 18 bp, synthetic construct
  source 1..18: mol_type = other DNA
ggtgagtacatggatgga

SEQ ID NO: 1763 - DNA, 18 bp, synthetic construct
  source 1..18: mol_type = other DNA
gtgagtacatggatggat

SEQ ID NO: 1764 - DNA, 18 bp, synthetic construct
  source 1..18: mol_type = other DNA
tgagtacatggatggata

SEQ ID NO: 1765 - DNA, 18 bp, synthetic construct
  source 1..18: mol_type = other DNA
gagtacatggatggatag

SEQ ID NO: 1766 - DNA, 18 bp, synthetic construct
  source 1..18: mol_type = other DNA
agtacatggatggataga

SEQ ID NO: 1767 - DNA, 18 bp, synthetic construct
  source 1..18: mol_type = other DNA
gtacatggatggatagat

SEQ ID NO: 1768 - DNA, 18 bp, synthetic construct
  source 1..18: mol_type = other DNA
tacatggatggatagatg

SEQ ID NO: 1769 - DNA, 18 bp, synthetic construct
  source 1..18: mol_type = other DNA
acatggatggatagatgg

SEQ ID NO: 1770 - DNA, 18 bp, synthetic construct
  source 1..18: mol_type = other DNA
atggatggatagatggat

SEQ ID NO: 1771 - DNA, 18 bp, synthetic construct
  source 1..18: mol_type = other DNA
tggatggatagatggatg

SEQ ID NO: 1772 - DNA, 18 bp, synthetic construct
  source 1..18: mol_type = other DNA
ggatggatagatggatga

SEQ ID NO: 1773 - DNA, 18 bp, synthetic construct
  source 1..18: mol_type = other DNA
gatggatagatggatgag

SEQ ID NO: 1774 - DNA, 18 bp, synthetic construct
  source 1..18: mol_type = other DNA
atggatagatggatgagt

SEQ ID NO: 1775 - DNA, 18 bp, synthetic construct
  source 1..18: mol_type = other DNA
tggatagatggatgagtt

SEQ ID NO: 1776 - DNA, 18 bp, synthetic construct
  source 1..18: mol_type = other DNA
ggatagatggatgagttg

SEQ ID NO: 1777 - DNA, 18 bp, synthetic construct
  source 1..18: mol_type = other DNA
gatagatggatgagttgg

SEQ ID NO: 1778 - DNA, 18 bp, synthetic construct
  source 1..18: mol_type = other DNA
atagatggatgagttggt

SEQ ID NO: 1779 - DNA, 18 bp, synthetic construct
  source 1..18: mol_type = other DNA
tagatggatgagttggtg

SEQ ID NO: 1780 - DNA, 18 bp, synthetic construct
  source 1..18: mol_type = other DNA
agatggatgagttggtgg

SEQ ID NO: 1781 - DNA, 18 bp, synthetic construct
  source 1..18: mol_type = other DNA
gatggatgagttggtggg

SEQ ID NO: 1782 - DNA, 18 bp, synthetic construct
  source 1..18: mol_type = other DNA
atggatgagttggtgggt

SEQ ID NO: 1783 - DNA, 18 bp, synthetic construct
  source 1..18: mol_type = other DNA
tggatgagttggtgggta

SEQ ID NO: 1784 - DNA, 18 bp, synthetic construct
  source 1..18: mol_type = other DNA
ggatgagttggtgggtag

SEQ ID NO: 1785 - DNA, 18 bp, synthetic construct
  source 1..18: mol_type = other DNA
atgagttggtgggtagat

SEQ ID NO: 1786 - DNA, 18 bp, synthetic construct
  source 1..18: mol_type = other DNA
tgagttggtgggtagatt

SEQ ID NO: 1787 - DNA, 18 bp, synthetic construct
  source 1..18: mol_type = other DNA
gagttggtgggtagattc

SEQ ID NO: 1788 - DNA, 18 bp, synthetic construct
  source 1..18: mol_type = other DNA
agttggtgggtagattcg

SEQ ID NO: 1789 - DNA, 18 bp, synthetic construct
  source 1..18: mol_type = other DNA
gttggtgggtagattcgt

SEQ ID NO: 1790 - DNA, 18 bp, synthetic construct
  source 1..18: mol_type = other DNA
ttggtgggtagattcgtg

SEQ ID NO: 1791 - DNA, 18 bp, synthetic construct
  source 1..18: mol_type = other DNA
tggtgggtagattcgtgg

SEQ ID NO: 1792 - DNA, 18 bp, synthetic construct
  source 1..18: mol_type = other DNA
ggtgggtagattcgtggc

SEQ ID NO: 1793 - DNA, 18 bp, synthetic construct
  source 1..18: mol_type = other DNA
gtgggtagattcgtggct

SEQ ID NO: 1794 - DNA, 18 bp, synthetic construct
  source 1..18: mol_type = other DNA
tgggtagattcgtggcta

SEQ ID NO: 1795 - DNA, 18 bp, synthetic construct
  source 1..18: mol_type = other DNA
gggtagattcgtggctag

SEQ ID NO: 1796 - DNA, 18 bp, synthetic construct
  source 1..18: mol_type = other DNA
ggtagattcgtggctaga

SEQ ID NO: 1797 - DNA, 18 bp, synthetic construct
  source 1..18: mol_type = other DNA
gtagattcgtggctagat

SEQ ID NO: 1798 - DNA, 18 bp, synthetic construct
  source 1..18: mol_type = other DNA
tagattcgtggctagatg

SEQ ID NO: 1799 - DNA, 18 bp, synthetic construct
  source 1..18: mol_type = other DNA
gattcgtggctagatgga

SEQ ID NO: 1800 - DNA, 18 bp, synthetic construct
  source 1..18: mol_type = other DNA
attcgtggctagatggat

SEQ ID NO: 1801 - DNA, 18 bp, synthetic construct
  source 1..18: mol_type = other DNA
ttcgtggctagatggatg

SEQ ID NO: 1802 - DNA, 18 bp, synthetic construct
  source 1..18: mol_type = other DNA
tcgtggctagatggatga

SEQ ID NO: 1803 - DNA, 18 bp, synthetic construct
  source 1..18: mol_type = other DNA
cgtggctagatggatgat

SEQ ID NO: 1804 - DNA, 18 bp, synthetic construct
  source 1..18: mol_type = other DNA
gtggctagatggatgatg

SEQ ID NO: 1805 - DNA, 18 bp, synthetic construct
  source 1..18: mol_type = other DNA
tggctagatggatgatgg

SEQ ID NO: 1806 - DNA, 18 bp, synthetic construct
  source 1..18: mol_type = other DNA
ggctagatggatgatgga

SEQ ID NO: 1807 - DNA, 18 bp, synthetic construct
  source 1..18: mol_type = other DNA
gctagatggatgatggat

SEQ ID NO: 1808 - DNA, 18 bp, synthetic construct
  source 1..18: mol_type = other DNA
ctagatggatgatggatg

SEQ ID NO: 1809 - DNA, 18 bp, synthetic construct
  source 1..18: mol_type = other DNA
tagatggatgatggatgg

SEQ ID NO: 1810 - DNA, 18 bp, synthetic construct
  source 1..18: mol_type = other DNA
agatggatgatggatgga

SEQ ID NO: 1811 - DNA, 18 bp, synthetic construct
  source 1..18: mol_type = other DNA
gatggatgatggatggat

SEQ ID NO: 1812 - DNA, 18 bp, synthetic construct
  source 1..18: mol_type = other DNA
atggatgatggatggatg

SEQ ID NO: 1813 - DNA, 18 bp, synthetic construct
  source 1..18: mol_type = other DNA
tggatgatggatggatgg

SEQ ID NO: 1814 - DNA, 18 bp, synthetic construct
  source 1..18: mol_type = other DNA
ggatgatggatggatgga

SEQ ID NO: 1815 - DNA, 18 bp, synthetic construct
  source 1..18: mol_type = other DNA
gatgatggatggatggac

SEQ ID NO: 1816 - DNA, 18 bp, synthetic construct
  source 1..18: mol_type = other DNA
atgatggatggatggaca

SEQ ID NO: 1817 - DNA, 18 bp, synthetic construct
  source 1..18: mol_type = other DNA
gatggatggatggacaga

SEQ ID NO: 1818 - DNA, 18 bp, synthetic construct
  source 1..18: mol_type = other DNA
atggatggatggacagat

SEQ ID NO: 1819 - DNA, 18 bp, synthetic construct
  source 1..18: mol_type = other DNA
tggatggatggacagatg

SEQ ID NO: 1820 - DNA, 18 bp, synthetic construct
  source 1..18: mol_type = other DNA
ggatggatggacagatgg

SEQ ID NO: 1821 - DNA, 18 bp, synthetic construct
  source 1..18: mol_type = other DNA
gatggatggacagatgga

SEQ ID NO: 1822 - DNA, 18 bp, synthetic construct
  source 1..18: mol_type = other DNA
atggatggacagatggat

SEQ ID NO: 1823 - DNA, 18 bp, synthetic construct
  source 1..18: mol_type = other DNA
tggatggacagatggatg

SEQ ID NO: 1824 - DNA, 18 bp, synthetic construct
  source 1..18: mol_type = other DNA
ggatggacagatggatgg

SEQ ID NO: 1825 - DNA, 18 bp, synthetic construct
  source 1..18: mol_type = other DNA
gatggacagatggatgga

SEQ ID NO: 1826 - DNA, 18 bp, synthetic construct
  source 1..18: mol_type = other DNA
atggacagatggatggat

SEQ ID NO: 1827 - DNA, 18 bp, synthetic construct
  source 1..18: mol_type = other DNA
tggacagatggatggata

SEQ ID NO: 1828 - DNA, 18 bp, synthetic construct
  source 1..18: mol_type = other DNA
ggacagatggatggatat

SEQ ID NO: 1829 - DNA, 18 bp, synthetic construct
  source 1..18: mol_type = other DNA
gacagatggatggatata

SEQ ID NO: 1830 - DNA, 18 bp, synthetic construct
  source 1..18: mol_type = other DNA
acagatggatggatatat

SEQ ID NO: 1831 - DNA, 18 bp, synthetic construct
  source 1..18: mol_type = other DNA
cagatggatggatatatg

SEQ ID NO: 1832 - DNA, 18 bp, synthetic construct
  source 1..18: mol_type = other DNA
gatggatggatatatgat

SEQ ID NO: 1833 - DNA, 18 bp, synthetic construct
  source 1..18: mol_type = other DNA
atggatggatatatgatt

SEQ ID NO: 1834 - DNA, 18 bp, synthetic construct
  source 1..18: mol_type = other DNA
tggatggatatatgattg

SEQ ID NO: 1835 - DNA, 18 bp, synthetic construct
  source 1..18: mol_type = other DNA
ggatggatatatgattga

SEQ ID NO: 1836 - DNA, 18 bp, synthetic construct
  source 1..18: mol_type = other DNA
gatggatatatgattgaa

SEQ ID NO: 1837 - DNA, 18 bp, synthetic construct
  source 1..18: mol_type = other DNA
atggatatatgattgaac

SEQ ID NO: 1838 - DNA, 18 bp, synthetic construct
  source 1..18: mol_type = other DNA
tggatatatgattgaact

SEQ ID NO: 1839 - DNA, 18 bp, synthetic construct
  source 1..18: mol_type = other DNA
ggatatatgattgaacta

SEQ ID NO: 1840 - DNA, 18 bp, synthetic construct
  source 1..18: mol_type = other DNA
gatatatgattgaactat

SEQ ID NO: 1841 - DNA, 18 bp, synthetic construct
  source 1..18: mol_type = other DNA
atatatgattgaactatt

SEQ ID NO: 1842 - DNA, 18 bp, synthetic construct
  source 1..18: mol_type = other DNA
tatatgattgaactattg

SEQ ID NO: 1843 - DNA, 18 bp, synthetic construct
  source 1..18: mol_type = other DNA
atatgattgaactattga

SEQ ID NO: 1844 - DNA, 18 bp, synthetic construct
  source 1..18: mol_type = other DNA
tatgattgaactattgaa

SEQ ID NO: 1845 - DNA, 18 bp, synthetic construct
  source 1..18: mol_type = other DNA
atgattgaactattgaaa

SEQ ID NO: 1846 - DNA, 18 bp, synthetic construct
  source 1..18: mol_type = other DNA
gattgaactattgaaagt

SEQ ID NO: 1847 - DNA, 18 bp, synthetic construct
  source 1..18: mol_type = other DNA
attgaactattgaaagta

SEQ ID NO: 1848 - DNA, 18 bp, synthetic construct
  source 1..18: mol_type = other DNA
ttgaactattgaaagtat

SEQ ID NO: 1849 - DNA, 18 bp, synthetic construct
  source 1..18: mol_type = other DNA
tgaactattgaaagtata

SEQ ID NO: 1850 - DNA, 18 bp, synthetic construct
  source 1..18: mol_type = other DNA
gaactattgaaagtatag

SEQ ID NO: 1851 - DNA, 18 bp, synthetic construct
  source 1..18: mol_type = other DNA
aactattgaaagtataga

SEQ ID NO: 1852 - DNA, 18 bp, synthetic construct
  source 1..18: mol_type = other DNA
actattgaaagtatagat

SEQ ID NO: 1853 - DNA, 18 bp, synthetic construct
  source 1..18: mol_type = other DNA
ctattgaaagtatagatg

SEQ ID NO: 1854 - DNA, 18 bp, synthetic construct
  source 1..18: mol_type = other DNA
tattgaaagtatagatgt

SEQ ID NO: 1855 - DNA, 18 bp, synthetic construct
  source 1..18: mol_type = other DNA
attgaaagtatagatgta

SEQ ID NO: 1856 - DNA, 18 bp, synthetic construct
  source 1..18: mol_type = other DNA
ttgaaagtatagatgtat

SEQ ID NO: 1857 - DNA, 18 bp, synthetic construct
  source 1..18: mol_type = other DNA
tgaaagtatagatgtatg

SEQ ID NO: 1858 - DNA, 18 bp, synthetic construct
  source 1..18: mol_type = other DNA
gaaagtatagatgtatgg

SEQ ID NO: 1859 - DNA, 18 bp, synthetic construct
  source 1..18: mol_type = other DNA
aaagtatagatgtatgga

SEQ ID NO: 1860 - DNA, 18 bp, synthetic construct
  source 1..18: mol_type = other DNA
aagtatagatgtatggat

SEQ ID NO: 1861 - DNA, 18 bp, synthetic construct
  source 1..18: mol_type = other DNA
agtatagatgtatggatg

SEQ ID NO: 1862 - DNA, 18 bp, synthetic construct
  source 1..18: mol_type = other DNA
tatagatgtatggatggg

SEQ ID NO: 1863 - DNA, 18 bp, synthetic construct
  source 1..18: mol_type = other DNA
atagatgtatggatgggt

SEQ ID NO: 1864 - DNA, 18 bp, synthetic construct
  source 1..18: mol_type = other DNA
tagatgtatggatgggtg

SEQ ID NO: 1865 - DNA, 18 bp, synthetic construct
  source 1..18: mol_type = other DNA
agatgtatggatgggtga

SEQ ID NO: 1866 - DNA, 18 bp, synthetic construct
  source 1..18: mol_type = other DNA
gatgtatggatgggtgaa

SEQ ID NO: 1867 - DNA, 18 bp, synthetic construct
  source 1..18: mol_type = other DNA
atgtatggatgggtgaat

SEQ ID NO: 1868 - DNA, 18 bp, synthetic construct
  source 1..18: mol_type = other DNA
tgtatggatgggtgaatt

SEQ ID NO: 1869 - DNA, 18 bp, synthetic construct
  source 1..18: mol_type = other DNA
gtatggatgggtgaattt

SEQ ID NO: 1870 - DNA, 18 bp, synthetic construct
  source 1..18: mol_type = other DNA
tatggatgggtgaatttg

SEQ ID NO: 1871 - DNA, 18 bp, synthetic construct
  source 1..18: mol_type = other DNA
atggatgggtgaatttgg

SEQ ID NO: 1872 - DNA, 18 bp, synthetic construct
  source 1..18: mol_type = other DNA
tggatgggtgaatttggg

SEQ ID NO: 1873 - DNA, 18 bp, synthetic construct
  source 1..18: mol_type = other DNA
ggatgggtgaatttgggg

SEQ ID NO: 1874 - DNA, 18 bp, synthetic construct
  source 1..18: mol_type = other DNA
gatgggtgaatttggggg

SEQ ID NO: 1875 - DNA, 18 bp, synthetic construct
  source 1..18: mol_type = other DNA
atgggtgaatttgggggt

SEQ ID NO: 1876 - DNA, 18 bp, synthetic construct
  source 1..18: mol_type = other DNA
tgggtgaatttgggggta

SEQ ID NO: 1877 - DNA, 18 bp, synthetic construct
  source 1..18: mol_type = other DNA
gggtgaatttgggggtaa

SEQ ID NO: 1878 - DNA, 18 bp, synthetic construct
  source 1..18: mol_type = other DNA
gtgaatttgggggtaatt

SEQ ID NO: 1879 - DNA, 18 bp, synthetic construct
  source 1..18: mol_type = other DNA
tgaatttgggggtaattg

SEQ ID NO: 1880 - DNA, 18 bp, synthetic construct
  source 1..18: mol_type = other DNA
gaatttgggggtaattgt

SEQ ID NO: 1881 - DNA, 18 bp, synthetic construct
  source 1..18: mol_type = other DNA
aatttgggggtaattgtt

SEQ ID NO: 1882 - DNA, 18 bp, synthetic construct
  source 1..18: mol_type = other DNA
atttgggggtaattgtta

SEQ ID NO: 1883 - DNA, 18 bp, synthetic construct
  source 1..18: mol_type = other DNA
tttgggggtaattgttag

SEQ ID NO: 1884 - DNA, 18 bp, synthetic construct
  source 1..18: mol_type = other DNA
ttgggggtaattgttaga

SEQ ID NO: 1885 - DNA, 18 bp, synthetic construct
  source 1..18: mol_type = other DNA
tgggggtaattgttagat

SEQ ID NO: 1886 - DNA, 18 bp, synthetic construct
  source 1..18: mol_type = other DNA
gggggtaattgttagatg

SEQ ID NO: 1887 - DNA, 18 bp, synthetic construct
  source 1..18: mol_type = other DNA
ggggtaattgttagatga

SEQ ID NO: 1888 - DNA, 18 bp, synthetic construct
  source 1..18: mol_type = other DNA
gggtaattgttagatgat

SEQ ID NO: 1889 - DNA, 18 bp, synthetic construct
  source 1..18: mol_type = other DNA
ggtaattgttagatgatg

SEQ ID NO: 1890 - DNA, 18 bp, synthetic construct
  source 1..18: mol_type = other DNA
gtaattgttagatgatgg

SEQ ID NO: 1891 - DNA, 18 bp, synthetic construct
  source 1..18: mol_type = other DNA
taattgttagatgatgga

SEQ ID NO: 1892 - DNA, 18 bp, synthetic construct
  source 1..18: mol_type = other DNA
attgttagatgatggatg

SEQ ID NO: 1893 - DNA, 18 bp, synthetic construct
  source 1..18: mol_type = other DNA
ttgttagatgatggatga

SEQ ID NO: 1894 - DNA, 18 bp, synthetic construct
  source 1..18: mol_type = other DNA
tgttagatgatggatgag

SEQ ID NO: 1895 - DNA, 18 bp, synthetic construct
  source 1..18: mol_type = other DNA
gttagatgatggatgagt

SEQ ID NO: 1896 - DNA, 18 bp, synthetic construct
  source 1..18: mol_type = other DNA
ttagatgatggatgagta

SEQ ID NO: 1897 - DNA, 18 bp, synthetic construct
  source 1..18: mol_type = other DNA
tagatgatggatgagtat

SEQ ID NO: 1898 - DNA, 18 bp, synthetic construct
  source 1..18: mol_type = other DNA
agatgatggatgagtata

SEQ ID NO: 1899 - DNA, 18 bp, synthetic construct
  source 1..18: mol_type = other DNA
gatgatggatgagtatag

SEQ ID NO: 1900 - DNA, 18 bp, synthetic construct
  source 1..18: mol_type = other DNA
atgatggatgagtataga

SEQ ID NO: 1901 - DNA, 18 bp, synthetic construct
  source 1..18: mol_type = other DNA
tgatggatgagtatagat

SEQ ID NO: 1902 - DNA, 18 bp, synthetic construct
  source 1..18: mol_type = other DNA
gatggatgagtatagatg

SEQ ID NO: 1903 - DNA, 18 bp, synthetic construct
  source 1..18: mol_type = other DNA
atggatgagtatagatga

SEQ ID NO: 1904 - DNA, 18 bp, synthetic construct
  source 1..18: mol_type = other DNA
tggatgagtatagatgaa

SEQ ID NO: 1905 - DNA, 18 bp, synthetic construct
  source 1..18: mol_type = other DNA
ggatgagtatagatgaat

SEQ ID NO: 1906 - DNA, 18 bp, synthetic construct
  source 1..18: mol_type = other DNA
atgagtatagatgaatga

SEQ ID NO: 1907 - DNA, 18 bp, synthetic construct
  source 1..18: mol_type = other DNA
tgagtatagatgaatgat

SEQ ID NO: 1908 - DNA, 18 bp, synthetic construct
  source 1..18: mol_type = other DNA
gagtatagatgaatgatg

SEQ ID NO: 1909 - DNA, 18 bp, synthetic construct
  source 1..18: mol_type = other DNA
agtatagatgaatgatgg

SEQ ID NO: 1910 - DNA, 18 bp, synthetic construct
  source 1..18: mol_type = other DNA
gtatagatgaatgatgga

SEQ ID NO: 1911 - DNA, 18 bp, synthetic construct
  source 1..18: mol_type = other DNA
tatagatgaatgatggat

SEQ ID NO: 1912 - DNA, 18 bp, synthetic construct
  source 1..18: mol_type = other DNA
atagatgaatgatggatg

SEQ ID NO: 1913 - DNA, 18 bp, synthetic construct
  source 1..18: mol_type = other DNA
tagatgaatgatggatgg

SEQ ID NO: 1914 - DNA, 18 bp, synthetic construct
  source 1..18: mol_type = other DNA
agatgaatgatggatgga

SEQ ID NO: 1915 - DNA, 18 bp, synthetic construct
  source 1..18: mol_type = other DNA
gatgaatgatggatggat

SEQ ID NO: 1916 - DNA, 18 bp, synthetic construct
  source 1..18: mol_type = other DNA
atgaatgatggatggata

SEQ ID NO: 1917 - DNA, 18 bp, synthetic construct
  source 1..18: mol_type = other DNA
tgaatgatggatggataa

SEQ ID NO: 1918 - DNA, 18 bp, synthetic construct
  source 1..18: mol_type = other DNA
gaatgatggatggataac

SEQ ID NO: 1919 - DNA, 18 bp, synthetic construct
  source 1..18: mol_type = other DNA
atgatggatggataactt

SEQ ID NO: 1920 - DNA, 18 bp, synthetic construct
  source 1..18: mol_type = other DNA
tgatggatggataacttg

SEQ ID NO: 1921 - DNA, 18 bp, synthetic construct
  source 1..18: mol_type = other DNA
gatggatggataacttga

SEQ ID NO: 1922 - DNA, 18 bp, synthetic construct
  source 1..18: mol_type = other DNA
atggatggataacttgat

SEQ ID NO: 1923 - DNA, 18 bp, synthetic construct
  source 1..18: mol_type = other DNA
tggatggataacttgatg

SEQ ID NO: 1924 - DNA, 18 bp, synthetic construct
  source 1..18: mol_type = other DNA
ggatggataacttgatga

SEQ ID NO: 1925 - DNA, 18 bp, synthetic construct
  source 1..18: mol_type = other DNA
gatggataacttgatgag

SEQ ID NO: 1926 - DNA, 18 bp, synthetic construct
  source 1..18: mol_type = other DNA
atggataacttgatgagt

SEQ ID NO: 1927 - DNA, 18 bp, synthetic construct
  source 1..18: mol_type = other DNA
tggataacttgatgagtg

SEQ ID NO: 1928 - DNA, 18 bp, synthetic construct
  source 1..18: mol_type = other DNA
gataacttgatgagtgga

SEQ ID NO: 1929 - DNA, 18 bp, synthetic construct
  source 1..18: mol_type = other DNA
ataacttgatgagtggat

SEQ ID NO: 1930 - DNA, 18 bp, synthetic construct
  source 1..18: mol_type = other DNA
taacttgatgagtggata

SEQ ID NO: 1931 - DNA, 18 bp, synthetic construct
  source 1..18: mol_type = other DNA
aacttgatgagtggatag

SEQ ID NO: 1932 - DNA, 18 bp, synthetic construct
  source 1..18: mol_type = other DNA
acttgatgagtggataga

SEQ ID NO: 1933 - DNA, 18 bp, synthetic construct
  source 1..18: mol_type = other DNA
cttgatgagtggatagat

SEQ ID NO: 1934 - DNA, 18 bp, synthetic construct
  source 1..18: mol_type = other DNA
ttgatgagtggatagata

SEQ ID NO: 1935 - DNA, 18 bp, synthetic construct
  source 1..18: mol_type = other DNA
tgatgagtggatagatag

SEQ ID NO: 1936 - DNA, 18 bp, synthetic construct
  source 1..18: mol_type = other DNA
gatgagtggatagataga

SEQ ID NO: 1937 - DNA, 18 bp, synthetic construct
  source 1..18: mol_type = other DNA
atgagtggatagatagat

SEQ ID NO: 1938 - DNA, 18 bp, synthetic construct
  source 1..18: mol_type = other DNA
tgagtggatagatagatt

SEQ ID NO: 1939 - DNA, 18 bp, synthetic construct
  source 1..18: mol_type = other DNA
gagtggatagatagattg

SEQ ID NO: 1940 - DNA, 18 bp, synthetic construct
  source 1..18: mol_type = other DNA
agtggatagatagattgc

SEQ ID NO: 1941 - DNA, 18 bp, synthetic construct
  source 1..18: mol_type = other DNA
gtggatagatagattgct

SEQ ID NO: 1942 - DNA, 18 bp, synthetic construct
  source 1..18: mol_type = other DNA
tggatagatagattgctg

SEQ ID NO: 1943 - DNA, 18 bp, synthetic construct
  source 1..18: mol_type = other DNA
ggatagatagattgctgg

SEQ ID NO: 1944 - DNA, 18 bp, synthetic construct
  source 1..18: mol_type = other DNA
gatagatagattgctgga

SEQ ID NO: 1945 - DNA, 18 bp, synthetic construct
  source 1..18: mol_type = other DNA
tagatagattgctggata

SEQ ID NO: 1946 - DNA, 18 bp, synthetic construct
  source 1..18: mol_type = other DNA
agatagattgctggatag

SEQ ID NO: 1947 - DNA, 18 bp, synthetic construct
  source 1..18: mol_type = other DNA
gatagattgctggataga

SEQ ID NO: 1948 - DNA, 18 bp, synthetic construct
  source 1..18: mol_type = other DNA
atagattgctggatagat

SEQ ID NO: 1949 - DNA, 18 bp, synthetic construct
  source 1..18: mol_type = other DNA
tagattgctggatagatg

SEQ ID NO: 1950 - DNA, 18 bp, synthetic construct
  source 1..18: mol_type = other DNA
agattgctggatagatga

SEQ ID NO: 1951 - DNA, 18 bp, synthetic construct
  source 1..18: mol_type = other DNA
gattgctggatagatgat

SEQ ID NO: 1952 - DNA, 18 bp, synthetic construct
  source 1..18: mol_type = other DNA
attgctggatagatgatt

SEQ ID NO: 1953 - DNA, 18 bp, synthetic construct
  source 1..18: mol_type = other DNA
ttgctggatagatgattg

SEQ ID NO: 1954 - DNA, 18 bp, synthetic construct
  source 1..18: mol_type = other DNA
tgctggatagatgattga

SEQ ID NO: 1955 - DNA, 18 bp, synthetic construct
  source 1..18: mol_type = other DNA
gctggatagatgattgac

SEQ ID NO: 1956 - DNA, 18 bp, synthetic construct
  source 1..18: mol_type = other DNA
ctggatagatgattgact

SEQ ID NO: 1957 - DNA, 18 bp, synthetic construct
  source 1..18: mol_type = other DNA
tggatagatgattgactg

SEQ ID NO: 1958 - DNA, 18 bp, synthetic construct
  source 1..18: mol_type = other DNA
ggatagatgattgactgg

SEQ ID NO: 1959 - DNA, 18 bp, synthetic construct
  source 1..18: mol_type = other DNA
gatagatgattgactggg

SEQ ID NO: 1960 - DNA, 18 bp, synthetic construct
  source 1..18: mol_type = other DNA
atagatgattgactgggt

SEQ ID NO: 1961 - DNA, 18 bp, synthetic construct
  source 1..18: mol_type = other DNA
tagatgattgactgggtg

SEQ ID NO: 1962 - DNA, 18 bp, synthetic construct
  source 1..18: mol_type = other DNA
agatgattgactgggtgg

SEQ ID NO: 1963 - DNA, 18 bp, synthetic construct
  source 1..18: mol_type = other DNA
gatgattgactgggtgga

SEQ ID NO: 1964 - DNA, 18 bp, synthetic construct
  source 1..18: mol_type = other DNA
tgattgactgggtggata

SEQ ID NO: 1965 - DNA, 18 bp, synthetic construct
  source 1..18: mol_type = other DNA
gattgactgggtggatag

SEQ ID NO: 1966 - DNA, 18 bp, synthetic construct
  source 1..18: mol_type = other DNA
attgactgggtggataga

SEQ ID NO: 1967 - DNA, 18 bp, synthetic construct
  source 1..18: mol_type = other DNA
ttgactgggtggatagat

SEQ ID NO: 1968 - DNA, 18 bp, synthetic construct
  source 1..18: mol_type = other DNA
tgactgggtggatagatg

SEQ ID NO: 1969 - DNA, 18 bp, synthetic construct
  source 1..18: mol_type = other DNA
gactgggtggatagatga

SEQ ID NO: 1970 - DNA, 18 bp, synthetic construct
  source 1..18: mol_type = other DNA
actgggtggatagatgaa

SEQ ID NO: 1971 - DNA, 18 bp, synthetic construct
  source 1..18: mol_type = other DNA
ctgggtggatagatgaaa

SEQ ID NO: 1972 - DNA, 18 bp, synthetic construct
  source 1..18: mol_type = other DNA
tgggtggatagatgaaat

SEQ ID NO: 1973 - DNA, 18 bp, synthetic construct
  source 1..18: mol_type = other DNA
gggtggatagatgaaatg

SEQ ID NO: 1974 - DNA, 18 bp, synthetic construct
  source 1..18: mol_type = other DNA
ggtggatagatgaaatgt

SEQ ID NO: 1975 - DNA, 18 bp, synthetic construct
  source 1..18: mol_type = other DNA
gtggatagatgaaatgtt

SEQ ID NO: 1976 - DNA, 18 bp, synthetic construct
  source 1..18: mol_type = other DNA
tggatagatgaaatgttg

SEQ ID NO: 1977 - DNA, 18 bp, synthetic construct
  source 1..18: mol_type = other DNA
ggatagatgaaatgttgg

SEQ ID NO: 1978 - DNA, 18 bp, synthetic construct
  source 1..18: mol_type = other DNA
gatagatgaaatgttgga

SEQ ID NO: 1979 - DNA, 18 bp, synthetic construct
  source 1..18: mol_type = other DNA
atagatgaaatgttggat

SEQ ID NO: 1980 - DNA, 18 bp, synthetic construct
  source 1..18: mol_type = other DNA
tagatgaaatgttggatg

SEQ ID NO: 1981 - DNA, 18 bp, synthetic construct
  source 1..18: mol_type = other DNA
agatgaaatgttggatga

SEQ ID NO: 1982 - DNA, 18 bp, synthetic construct
  source 1..18: mol_type = other DNA
gatgaaatgttggatgag

SEQ ID NO: 1983 - DNA, 18 bp, synthetic construct
  source 1..18: mol_type = other DNA
tgaaatgttggatgagca

SEQ ID NO: 1984 - DNA, 18 bp, synthetic construct
  source 1..18: mol_type = other DNA
gaaatgttggatgagcag

SEQ ID NO: 1985 - DNA, 18 bp, synthetic construct
  source 1..18: mol_type = other DNA
aaatgttggatgagcaga

SEQ ID NO: 1986 - DNA, 18 bp, synthetic construct
  source 1..18: mol_type = other DNA
aatgttggatgagcagat

SEQ ID NO: 1987 - DNA, 18 bp, synthetic construct
  source 1..18: mol_type = other DNA
atgttggatgagcagatt

SEQ ID NO: 1988 - DNA, 18 bp, synthetic construct
  source 1..18: mol_type = other DNA
tgttggatgagcagatta

SEQ ID NO: 1989 - DNA, 18 bp, synthetic construct
  source 1..18: mol_type = other DNA
gttggatgagcagattaa

SEQ ID NO: 1990 - DNA, 18 bp, synthetic construct
  source 1..18: mol_type = other DNA
ttggatgagcagattaag

SEQ ID NO: 1991 - DNA, 18 bp, synthetic construct
  source 1..18: mol_type = other DNA
tggatgagcagattaagt

SEQ ID NO: 1992 - DNA, 18 bp, synthetic construct
  source 1..18: mol_type = other DNA
ggatgagcagattaagtt

SEQ ID NO: 1993 - DNA, 18 bp, synthetic construct
  source 1..18: mol_type = other DNA
gatgagcagattaagttg

SEQ ID NO: 1994 - DNA, 18 bp, synthetic construct
  source 1..18: mol_type = other DNA
atgagcagattaagttgt

SEQ ID NO: 1995 - DNA, 18 bp, synthetic construct
  source 1..18: mol_type = other DNA
tgagcagattaagttgta

SEQ ID NO: 1996 - DNA, 18 bp, synthetic construct
  source 1..18: mol_type = other DNA
gagcagattaagttgtat

SEQ ID NO: 1997 - DNA, 18 bp, synthetic construct
  source 1..18: mol_type = other DNA
agcagattaagttgtatt

SEQ ID NO: 1998 - DNA, 18 bp, synthetic construct
  source 1..18: mol_type = other DNA
gcagattaagttgtattg

SEQ ID NO: 1999 - DNA, 18 bp, synthetic construct
  source 1..18: mol_type = other DNA
agattaagttgtattgga

SEQ ID NO: 2000 - DNA, 18 bp, synthetic construct
  source 1..18: mol_type = other DNA
gattaagttgtattggat

SEQ ID NO: 2001 - DNA, 18 bp, synthetic construct
  source 1..18: mol_type = other DNA
attaagttgtattggatg

SEQ ID NO: 2002 - DNA, 18 bp, synthetic construct
  source 1..18: mol_type = other DNA
ttaagttgtattggatgg

SEQ ID NO: 2003 - DNA, 18 bp, synthetic construct
  source 1..18: mol_type = other DNA
taagttgtattggatggg

SEQ ID NO: 2004 - DNA, 18 bp, synthetic construct
  source 1..18: mol_type = other DNA
aagttgtattggatggga

SEQ ID NO: 2005 - DNA, 18 bp, synthetic construct
  source 1..18: mol_type = other DNA
agttgtattggatgggat

SEQ ID NO: 2006 - DNA, 18 bp, synthetic construct
  source 1..18: mol_type = other DNA
gttgtattggatgggatg

SEQ ID NO: 2007 - DNA, 18 bp, synthetic construct
  source 1..18: mol_type = other DNA
ttgtattggatgggatgg

SEQ ID NO: 2008 - DNA, 18 bp, synthetic construct
  source 1..18: mol_type = other DNA
tgtattggatgggatgga

SEQ ID NO: 2009 - DNA, 18 bp, synthetic construct
  source 1..18: mol_type = other DNA
gtattggatgggatggat

SEQ ID NO: 2010 - DNA, 18 bp, synthetic construct
  source 1..18: mol_type = other DNA
tattggatgggatggatg

SEQ ID NO: 2011 - DNA, 18 bp, synthetic construct
  source 1..18: mol_type = other DNA
attggatgggatggatgg

SEQ ID NO: 2012 - DNA, 18 bp, synthetic construct
  source 1..18: mol_type = other DNA
ttggatgggatggatgga

SEQ ID NO: 2013 - DNA, 18 bp, synthetic construct
  source 1..18: mol_type = other DNA
tggatgggatggatggaa

SEQ ID NO: 2014 - DNA, 18 bp, synthetic construct
  source 1..18: mol_type = other DNA
ggatgggatggatggaag

SEQ ID NO: 2015 - DNA, 18 bp, synthetic construct
  source 1..18: mol_type = other DNA
gatgggatggatggaagt

SEQ ID NO: 2016 - DNA, 18 bp, synthetic construct
  source 1..18: mol_type = other DNA
atgggatggatggaagtg

SEQ ID NO: 2017 - DNA, 18 bp, synthetic construct
  source 1..18: mol_type = other DNA
gggatggatggaagtgtg

SEQ ID NO: 2018 - DNA, 18 bp, synthetic construct
  source 1..18: mol_type = other DNA
ggatggatggaagtgtgg

SEQ ID NO: 2019 - DNA, 18 bp, synthetic construct
  source 1..18: mol_type = other DNA
gatggatggaagtgtggt

SEQ ID NO: 2020 - DNA, 18 bp, synthetic construct
  source 1..18: mol_type = other DNA
atggatggaagtgtggtt

SEQ ID NO: 2021 - DNA, 18 bp, synthetic construct
  source 1..18: mol_type = other DNA
tggatggaagtgtggttg

SEQ ID NO: 2022 - DNA, 18 bp, synthetic construct
  source 1..18: mol_type = other DNA
ggatggaagtgtggttga

SEQ ID NO: 2023 - DNA, 18 bp, synthetic construct
  source 1..18: mol_type = other DNA
gatggaagtgtggttgag

SEQ ID NO: 2024 - DNA, 18 bp, synthetic construct
  source 1..18: mol_type = other DNA
atggaagtgtggttgagt

SEQ ID NO: 2025 - DNA, 18 bp, synthetic construct
  source 1..18: mol_type = other DNA
tggaagtgtggttgagtt

SEQ ID NO: 2026 - DNA, 18 bp, synthetic construct
  source 1..18: mol_type = other DNA
ggaagtgtggttgagtta

SEQ ID NO: 2027 - DNA, 18 bp, synthetic construct
  source 1..18: mol_type = other DNA
gaagtgtggttgagttat

SEQ ID NO: 2028 - DNA, 18 bp, synthetic construct
  source 1..18: mol_type = other DNA
aagtgtggttgagttatt

SEQ ID NO: 2029 - DNA, 18 bp, synthetic construct
  source 1..18: mol_type = other DNA
agtgtggttgagttatta

SEQ ID NO: 2030 - DNA, 18 bp, synthetic construct
  source 1..18: mol_type = other DNA
gtgtggttgagttattag

SEQ ID NO: 2031 - DNA, 18 bp, synthetic construct
  source 1..18: mol_type = other DNA
tgtggttgagttattaga

SEQ ID NO: 2032 - DNA, 18 bp, synthetic construct
  source 1..18: mol_type = other DNA
gtggttgagttattagaa

SEQ ID NO: 2033 - DNA, 18 bp, synthetic construct
  source 1..18: mol_type = other DNA
tggttgagttattagaag

SEQ ID NO: 2034 - DNA, 18 bp, synthetic construct
  source 1..18: mol_type = other DNA
ggttgagttattagaagg

SEQ ID NO: 2035 - DNA, 18 bp, synthetic construct
  source 1..18: mol_type = other DNA
gttgagttattagaagga

SEQ ID NO: 2036 - DNA, 18 bp, synthetic construct
  source 1..18: mol_type = other DNA
tgagttattagaaggaag

SEQ ID NO: 2037 - DNA, 18 bp, synthetic construct
  source 1..18: mol_type = other DNA
gagttattagaaggaaga

SEQ ID NO: 2038 - DNA, 18 bp, synthetic construct
  source 1..18: mol_type = other DNA
agttattagaaggaagat

SEQ ID NO: 2039 - DNA, 18 bp, synthetic construct
  source 1..18: mol_type = other DNA
gttattagaaggaagatt

SEQ ID NO: 2040 - DNA, 18 bp, synthetic construct
  source 1..18: mol_type = other DNA
ttattagaaggaagattg

SEQ ID NO: 2041 - DNA, 18 bp, synthetic construct
  source 1..18: mol_type = other DNA
tattagaaggaagattga

SEQ ID NO: 2042 - DNA, 18 bp, synthetic construct
  source 1..18: mol_type = other DNA
attagaaggaagattgag

SEQ ID NO: 2043 - DNA, 18 bp, synthetic construct
  source 1..18: mol_type = other DNA
ttagaaggaagattgagt

SEQ ID NO: 2044 - DNA, 18 bp, synthetic construct
  source 1..18: mol_type = other DNA
tagaaggaagattgagta

SEQ ID NO: 2045 - DNA, 18 bp, synthetic construct
  source 1..18: mol_type = other DNA
agaaggaagattgagtag

SEQ ID NO: 2046 - DNA, 18 bp, synthetic construct
  source 1..18: mol_type = other DNA
gaaggaagattgagtaga

SEQ ID NO: 2047 - DNA, 18 bp, synthetic construct
  source 1..18: mol_type = other DNA
aaggaagattgagtagat

SEQ ID NO: 2048 - DNA, 18 bp, synthetic construct
  source 1..18: mol_type = other DNA
aggaagattgagtagata

SEQ ID NO: 2049 - DNA, 18 bp, synthetic construct
  source 1..18: mol_type = other DNA
ggaagattgagtagatag

SEQ ID NO: 2050 - DNA, 18 bp, synthetic construct
  source 1..18: mol_type = other DNA
gaagattgagtagatagg

SEQ ID NO: 2051 - DNA, 18 bp, synthetic construct
  source 1..18: mol_type = other DNA
aagattgagtagataggt

SEQ ID NO: 2052 - DNA, 18 bp, synthetic construct
  source 1..18: mol_type = other DNA
gattgagtagataggtga

SEQ ID NO: 2053 - DNA, 18 bp, synthetic construct
  source 1..18: mol_type = other DNA
attgagtagataggtgaa

SEQ ID NO: 2054 - DNA, 18 bp, synthetic construct
  source 1..18: mol_type = other DNA
ttgagtagataggtgaat

SEQ ID NO: 2055 - DNA, 18 bp, synthetic construct
  source 1..18: mol_type = other DNA
tgagtagataggtgaatt

SEQ ID NO: 2056 - DNA, 18 bp, synthetic construct
  source 1..18: mol_type = other DNA
gagtagataggtgaattt

SEQ ID NO: 2057 - DNA, 18 bp, synthetic construct
  source 1..18: mol_type = other DNA
agtagataggtgaatttg

SEQ ID NO: 2058 - DNA, 18 bp, synthetic construct
  source 1..18: mol_type = other DNA
gtagataggtgaatttgt

SEQ ID NO: 2059 - DNA, 18 bp, synthetic construct
  source 1..18: mol_type = other DNA
tagataggtgaatttgtt

SEQ ID NO: 2060 - DNA, 18 bp, synthetic construct
  source 1..18: mol_type = other DNA
agataggtgaatttgttg

SEQ ID NO: 2061 - DNA, 18 bp, synthetic construct
  source 1..18: mol_type = other DNA
gataggtgaatttgttga

SEQ ID NO: 2062 - DNA, 18 bp, synthetic construct
  source 1..18: mol_type = other DNA
ataggtgaatttgttgat

SEQ ID NO: 2063 - DNA, 18 bp, synthetic construct
  source 1..18: mol_type = other DNA
taggtgaatttgttgata

SEQ ID NO: 2064 - DNA, 18 bp, synthetic construct
  source 1..18: mol_type = other DNA
aggtgaatttgttgatag

SEQ ID NO: 2065 - DNA, 18 bp, synthetic construct
  source 1..18: mol_type = other DNA
ggtgaatttgttgatagt

SEQ ID NO: 2066 - DNA, 18 bp, synthetic construct
  source 1..18: mol_type = other DNA
gtgaatttgttgatagtc

SEQ ID NO: 2067 - DNA, 18 bp, synthetic construct
  source 1..18: mol_type = other DNA
tgaatttgttgatagtca

SEQ ID NO: 2068 - DNA, 18 bp, synthetic construct
  source 1..18: mol_type = other DNA
gaatttgttgatagtcag

SEQ ID NO: 2069 - DNA, 18 bp, synthetic construct
  source 1..18: mol_type = other DNA
aatttgttgatagtcaga

SEQ ID NO: 2070 - DNA, 18 bp, synthetic construct
  source 1..18: mol_type = other DNA
atttgttgatagtcagat

SEQ ID NO: 2071 - DNA, 18 bp, synthetic construct
  source 1..18: mol_type = other DNA
ttgttgatagtcagatgg

SEQ ID NO: 2072 - DNA, 18 bp, synthetic construct
  source 1..18: mol_type = other DNA
tgttgatagtcagatggg

SEQ ID NO: 2073 - DNA, 18 bp, synthetic construct
  source 1..18: mol_type = other DNA
gttgatagtcagatgggt

SEQ ID NO: 2074 - DNA, 18 bp, synthetic construct
  source 1..18: mol_type = other DNA
ttgatagtcagatgggta

SEQ ID NO: 2075 - DNA, 18 bp, synthetic construct
  source 1..18: mol_type = other DNA
tgatagtcagatgggtag

SEQ ID NO: 2076 - DNA, 18 bp, synthetic construct
  source 1..18: mol_type = other DNA
gatagtcagatgggtaga

SEQ ID NO: 2077 - DNA, 18 bp, synthetic construct
  source 1..18: mol_type = other DNA
atagtcagatgggtagat

SEQ ID NO: 2078 - DNA, 18 bp, synthetic construct
  source 1..18: mol_type = other DNA
tagtcagatgggtagata

SEQ ID NO: 2079 - DNA, 18 bp, synthetic construct
  source 1..18: mol_type = other DNA
agtcagatgggtagatag

SEQ ID NO: 2080 - DNA, 18 bp, synthetic construct
  source 1..18: mol_type = other DNA
gtcagatgggtagatagg

SEQ ID NO: 2081 - DNA, 18 bp, synthetic construct
  source 1..18: mol_type = other DNA
tcagatgggtagataggt

SEQ ID NO: 2082 - DNA, 18 bp, synthetic construct
  source 1..18: mol_type = other DNA
cagatgggtagataggta

SEQ ID NO: 2083 - DNA, 18 bp, synthetic construct
  source 1..18: mol_type = other DNA
agatgggtagataggtag

SEQ ID NO: 2084 - DNA, 18 bp, synthetic construct
  source 1..18: mol_type = other DNA
gatgggtagataggtaga

SEQ ID NO: 2085 - DNA, 18 bp, synthetic construct
  source 1..18: mol_type = other DNA
atgggtagataggtagat

SEQ ID NO: 2086 - DNA, 18 bp, synthetic construct
  source 1..18: mol_type = other DNA
tgggtagataggtagatg

SEQ ID NO: 2087 - DNA, 18 bp, synthetic construct
  source 1..18: mol_type = other DNA
ggtagataggtagatgga

SEQ ID NO: 2088 - DNA, 18 bp, synthetic construct
  source 1..18: mol_type = other DNA
gtagataggtagatggat

SEQ ID NO: 2089 - DNA, 18 bp, synthetic construct
  source 1..18: mol_type = other DNA
tagataggtagatggatg

SEQ ID NO: 2090 - DNA, 18 bp, synthetic construct
  source 1..18: mol_type = other DNA
agataggtagatggatgg

SEQ ID NO: 2091 - DNA, 18 bp, synthetic construct
  source 1..18: mol_type = other DNA
gataggtagatggatgga

SEQ ID NO: 2092 - DNA, 18 bp, synthetic construct
  source 1..18: mol_type = other DNA
ataggtagatggatggat

SEQ ID NO: 2093 - DNA, 18 bp, synthetic construct
  source 1..18: mol_type = other DNA
taggtagatggatggatg

SEQ ID NO: 2094 - DNA, 18 bp, synthetic construct
  source 1..18: mol_type = other DNA
aggtagatggatggatgg

SEQ ID NO: 2095 - DNA, 18 bp, synthetic construct
  source 1..18: mol_type = other DNA
ggtagatggatggatgga

SEQ ID NO: 2096 - DNA, 18 bp, synthetic construct
  source 1..18: mol_type = other DNA
gtagatggatggatggat

SEQ ID NO: 2097 - DNA, 18 bp, synthetic construct
  source 1..18: mol_type = other DNA
tagatggatggatggatg

SEQ ID NO: 2098 - DNA, 18 bp, synthetic construct
  source 1..18: mol_type = other DNA
agatggatggatggatgg

SEQ ID NO: 2099 - DNA, 18 bp, synthetic construct
  source 1..18: mol_type = other DNA
gatggatggatggatgga

SEQ ID NO: 2100 - DNA, 18 bp, synthetic construct
  source 1..18: mol_type = other DNA
atggatggatggatggat

SEQ ID NO: 2101 - DNA, 18 bp, synthetic construct
  source 1..18: mol_type = other DNA
tggatggatggatggatg

SEQ ID NO: 2102 - DNA, 18 bp, synthetic construct
  source 1..18: mol_type = other DNA
gatggatggatggatgga

SEQ ID NO: 2103 - DNA, 18 bp, synthetic construct
  source 1..18: mol_type = other DNA
atggatggatggatggat

SEQ ID NO: 2104 - DNA, 18 bp, synthetic construct
  source 1..18: mol_type = other DNA
tggatggatggatggatg

SEQ ID NO: 2105 - DNA, 18 bp, synthetic construct
  source 1..18: mol_type = other DNA
ggatggatggatggatgt

SEQ ID NO: 2106 - DNA, 18 bp, synthetic construct
  source 1..18: mol_type = other DNA
gatggatggatggatgta

SEQ ID NO: 2107 - DNA, 18 bp, synthetic construct
  source 1..18: mol_type = other DNA
atggatggatggatgtat

SEQ ID NO: 2108 - DNA, 18 bp, synthetic construct
  source 1..18: mol_type = other DNA
tggatggatggatgtata

SEQ ID NO: 2109 - DNA, 18 bp, synthetic construct
  source 1..18: mol_type = other DNA
ggatggatggatgtatag

SEQ ID NO: 2110 - DNA, 18 bp, synthetic construct
  source 1..18: mol_type = other DNA
gatggatggatgtatagg

SEQ ID NO: 2111 - DNA, 18 bp, synthetic construct
  source 1..18: mol_type = other DNA
atggatggatgtataggc

SEQ ID NO: 2112 - DNA, 18 bp, synthetic construct
  source 1..18: mol_type = other DNA
tggatggatgtataggca

SEQ ID NO: 2113 - DNA, 18 bp, synthetic construct
  source 1..18: mol_type = other DNA
ggatggatgtataggcag

SEQ ID NO: 2114 - DNA, 18 bp, synthetic construct
  source 1..18: mol_type = other DNA
gatggatgtataggcaga

SEQ ID NO: 2115 - DNA, 18 bp, synthetic construct
  source 1..18: mol_type = other DNA
atggatgtataggcagat

SEQ ID NO: 2116 - DNA, 18 bp, synthetic construct
  source 1..18: mol_type = other DNA
tggatgtataggcagatg

SEQ ID NO: 2117 - DNA, 18 bp, synthetic construct
  source 1..18: mol_type = other DNA
ggatgtataggcagatgg

SEQ ID NO: 2118 - DNA, 18 bp, synthetic construct
  source 1..18: mol_type = other DNA
gatgtataggcagatgga

SEQ ID NO: 2119 - DNA, 18 bp, synthetic construct
  source 1..18: mol_type = other DNA
tgtataggcagatggaca

SEQ ID NO: 2120 - DNA, 18 bp, synthetic construct
  source 1..18: mol_type = other DNA
gtataggcagatggacaa

SEQ ID NO: 2121 - DNA, 18 bp, synthetic construct
  source 1..18: mol_type = other DNA
tataggcagatggacaaa

SEQ ID NO: 2122 - DNA, 18 bp, synthetic construct
  source 1..18: mol_type = other DNA
ataggcagatggacaaat

SEQ ID NO: 2123 - DNA, 18 bp, synthetic construct
  source 1..18: mol_type = other DNA
taggcagatggacaaatg

SEQ ID NO: 2124 - DNA, 18 bp, synthetic construct
  source 1..18: mol_type = other DNA
aggcagatggacaaatgg

SEQ ID NO: 2125 - DNA, 18 bp, synthetic construct
  source 1..18: mol_type = other DNA
ggcagatggacaaatgga

SEQ ID NO: 2126 - DNA, 18 bp, synthetic construct
  source 1..18: mol_type = other DNA
gcagatggacaaatggat

SEQ ID NO: 2127 - DNA, 18 bp, synthetic construct
  source 1..18: mol_type = other DNA
cagatggacaaatggatg

SEQ ID NO: 2128 - DNA, 18 bp, synthetic construct
  source 1..18: mol_type = other DNA
agatggacaaatggatga

SEQ ID NO: 2129 - DNA, 18 bp, synthetic construct
  source 1..18: mol_type = other DNA
gatggacaaatggatgaa

SEQ ID NO: 2130 - DNA, 18 bp, synthetic construct
  source 1..18: mol_type = other DNA
atggacaaatggatgaat

SEQ ID NO: 2131 - DNA, 18 bp, synthetic construct
  source 1..18: mol_type = other DNA
tggacaaatggatgaatg

SEQ ID NO: 2132 - DNA, 18 bp, synthetic construct
  source 1..18: mol_type = other DNA
ggacaaatggatgaatgg

SEQ ID NO: 2133 - DNA, 18 bp, synthetic construct
  source 1..18: mol_type = other DNA
gacaaatggatgaatggg

SEQ ID NO: 2134 - DNA, 18 bp, synthetic construct
  source 1..18: mol_type = other DNA
acaaatggatgaatgggt

SEQ ID NO: 2135 - DNA, 18 bp, synthetic construct
  source 1..18: mol_type = other DNA
caaatggatgaatgggtg

SEQ ID NO: 2136 - DNA, 18 bp, synthetic construct
  source 1..18: mol_type = other DNA
aaatggatgaatgggtgg

SEQ ID NO: 2137 - DNA, 18 bp, synthetic construct
  source 1..18: mol_type = other DNA
aatggatgaatgggtggg

SEQ ID NO: 2138 - DNA, 18 bp, synthetic construct
  source 1..18: mol_type = other DNA
tggatgaatgggtgggtg

SEQ ID NO: 2139 - DNA, 18 bp, synthetic construct
  source 1..18: mol_type = other DNA
ggatgaatgggtgggtgg

SEQ ID NO: 2140 - DNA, 18 bp, synthetic construct
  source 1..18: mol_type = other DNA
gatgaatgggtgggtgga

SEQ ID NO: 2141 - DNA, 18 bp, synthetic construct
  source 1..18: mol_type = other DNA
atgaatgggtgggtggat

SEQ ID NO: 2142 - DNA, 18 bp, synthetic construct
  source 1..18: mol_type = other DNA
tgaatgggtgggtggatg

SEQ ID NO: 2143 - DNA, 18 bp, synthetic construct
  source 1..18: mol_type = other DNA
gaatgggtgggtggatga

SEQ ID NO: 2144 - DNA, 18 bp, synthetic construct
  source 1..18: mol_type = other DNA
aatgggtgggtggatgaa

SEQ ID NO: 2145 - DNA, 18 bp, synthetic construct
  source 1..18: mol_type = other DNA
atgggtgggtggatgaat

SEQ ID NO: 2146 - DNA, 18 bp, synthetic construct
  source 1..18: mol_type = other DNA
tgggtgggtggatgaatg

SEQ ID NO: 2147 - DNA, 18 bp, synthetic construct
  source 1..18: mol_type = other DNA
gggtgggtggatgaatgg

SEQ ID NO: 2148 - DNA, 18 bp, synthetic construct
  source 1..18: mol_type = other DNA
ggtgggtggatgaatgga

SEQ ID NO: 2149 - DNA, 18 bp, synthetic construct
  source 1..18: mol_type = other DNA
gtgggtggatgaatggaa

SEQ ID NO: 2150 - DNA, 18 bp, synthetic construct
  source 1..18: mol_type = other DNA
tgggtggatgaatggaag

SEQ ID NO: 2151 - DNA, 18 bp, synthetic construct
  source 1..18: mol_type = other DNA
gggtggatgaatggaagg

SEQ ID NO: 2152 - DNA, 18 bp, synthetic construct
  source 1..18: mol_type = other DNA
ggtggatgaatggaagga

SEQ ID NO: 2153 - DNA, 18 bp, synthetic construct
  source 1..18: mol_type = other DNA
gtggatgaatggaaggat

SEQ ID NO: 2154 - DNA, 18 bp, synthetic construct
  source 1..18: mol_type = other DNA
tggatgaatggaaggatg

SEQ ID NO: 2155 - DNA, 18 bp, synthetic construct
  source 1..18: mol_type = other DNA
ggatgaatggaaggatgt

SEQ ID NO: 2156 - DNA, 18 bp, synthetic construct
  source 1..18: mol_type = other DNA
gatgaatggaaggatgtg

SEQ ID NO: 2157 - DNA, 18 bp, synthetic construct
  source 1..18: mol_type = other DNA
tgaatggaaggatgtgtg

SEQ ID NO: 2158 - DNA, 18 bp, synthetic construct
  source 1..18: mol_type = other DNA
gaatggaaggatgtgtgg

SEQ ID NO: 2159 - DNA, 18 bp, synthetic construct
  source 1..18: mol_type = other DNA
aatggaaggatgtgtggt

SEQ ID NO: 2160 - DNA, 18 bp, synthetic construct
  source 1..18: mol_type = other DNA
atggaaggatgtgtggtt

SEQ ID NO: 2161 - DNA, 18 bp, synthetic construct
  source 1..18: mol_type = other DNA
tggaaggatgtgtggttg

SEQ ID NO: 2162 - DNA, 18 bp, synthetic construct
  source 1..18: mol_type = other DNA
ggaaggatgtgtggttga

SEQ ID NO: 2163 - DNA, 18 bp, synthetic construct
  source 1..18: mol_type = other DNA
gaaggatgtgtggttgaa

SEQ ID NO: 2164 - DNA, 18 bp, synthetic construct
  source 1..18: mol_type = other DNA
aaggatgtgtggttgaac

SEQ ID NO: 2165 - DNA, 18 bp, synthetic construct
  source 1..18: mol_type = other DNA
aggatgtgtggttgaact

SEQ ID NO: 2166 - DNA, 18 bp, synthetic construct
  source 1..18: mol_type = other DNA
ggatgtgtggttgaacta

SEQ ID NO: 2167 - DNA, 18 bp, synthetic construct
  source 1..18: mol_type = other DNA
gatgtgtggttgaactat

SEQ ID NO: 2168 - DNA, 18 bp, synthetic construct
  source 1..18: mol_type = other DNA
atgtgtggttgaactatt

SEQ ID NO: 2169 - DNA, 18 bp, synthetic construct
  source 1..18: mol_type = other DNA
tgtgtggttgaactattg

SEQ ID NO: 2170 - DNA, 18 bp, synthetic construct
  source 1..18: mol_type = other DNA
gtgtggttgaactattgc

SEQ ID NO: 2171 - DNA, 18 bp, synthetic construct
  source 1..18: mol_type = other DNA
tgtggttgaactattgca

SEQ ID NO: 2172 - DNA, 18 bp, synthetic construct
  source 1..18: mol_type = other DNA
gtggttgaactattgcaa

SEQ ID NO: 2173 - DNA, 18 bp, synthetic construct
  source 1..18: mol_type = other DNA
ggttgaactattgcaagt

SEQ ID NO: 2174 - DNA, 18 bp, synthetic construct
  source 1..18: mol_type = other DNA
gttgaactattgcaagta

SEQ ID NO: 2175 - DNA, 18 bp, synthetic construct
  source 1..18: mol_type = other DNA
ttgaactattgcaagtat

SEQ ID NO: 2176 - DNA, 18 bp, synthetic construct
  source 1..18: mol_type = other DNA
tgaactattgcaagtatt

SEQ ID NO: 2177 - DNA, 18 bp, synthetic construct
  source 1..18: mol_type = other DNA
gaactattgcaagtattg

SEQ ID NO: 2178 - DNA, 18 bp, synthetic construct
  source 1..18: mol_type = other DNA
aactattgcaagtattga

SEQ ID NO: 2179 - DNA, 18 bp, synthetic construct
  source 1..18: mol_type = other DNA
actattgcaagtattgat

SEQ ID NO: 2180 - DNA, 18 bp, synthetic construct
  source 1..18: mol_type = other DNA
ctattgcaagtattgata

SEQ ID NO: 2181 - DNA, 18 bp, synthetic construct
  source 1..18: mol_type = other DNA
tattgcaagtattgataa

SEQ ID NO: 2182 - DNA, 18 bp, synthetic construct
  source 1..18: mol_type = other DNA
attgcaagtattgataat

SEQ ID NO: 2183 - DNA, 18 bp, synthetic construct
  source 1..18: mol_type = other DNA
ttgcaagtattgataatt

SEQ ID NO: 2184 - DNA, 18 bp, synthetic construct
  source 1..18: mol_type = other DNA
tgcaagtattgataattg

SEQ ID NO: 2185 - DNA, 18 bp, synthetic construct
  source 1..18: mol_type = other DNA
gcaagtattgataattgg

SEQ ID NO: 2186 - DNA, 18 bp, synthetic construct
  source 1..18: mol_type = other DNA
aagtattgataattgggt

SEQ ID NO: 2187 - DNA, 18 bp, synthetic construct
  source 1..18: mol_type = other DNA
agtattgataattgggtt

SEQ ID NO: 2188 - DNA, 18 bp, synthetic construct
  source 1..18: mol_type = other DNA
gtattgataattgggttc

SEQ ID NO: 2189 - DNA, 18 bp, synthetic construct
  source 1..18: mol_type = other DNA
tattgataattgggttca

SEQ ID NO: 2190 - DNA, 18 bp, synthetic construct
  source 1..18: mol_type = other DNA
attgataattgggttcat

SEQ ID NO: 2191 - DNA, 18 bp, synthetic construct
  source 1..18: mol_type = other DNA
ttgataattgggttcata

SEQ ID NO: 2192 - DNA, 18 bp, synthetic construct
  source 1..18: mol_type = other DNA
tgataattgggttcataa

SEQ ID NO: 2193 - DNA, 18 bp, synthetic construct
  source 1..18: mol_type = other DNA
gataattgggttcataat

SEQ ID NO: 2194 - DNA, 18 bp, synthetic construct
  source 1..18: mol_type = other DNA
ataattgggttcataatt

SEQ ID NO: 2195 - DNA, 18 bp, synthetic construct
  source 1..18: mol_type = other DNA
taattgggttcataattt

SEQ ID NO: 2196 - DNA, 18 bp, synthetic construct
  source 1..18: mol_type = other DNA
aattgggttcataatttc

SEQ ID NO: 2197 - DNA, 18 bp, synthetic construct
  source 1..18: mol_type = other DNA
attgggttcataatttct

SEQ ID NO: 2198 - DNA, 18 bp, synthetic construct
  source 1..18: mol_type = other DNA
ttgggttcataatttctg

SEQ ID NO: 2199 - DNA, 18 bp, synthetic construct
  source 1..18: mol_type = other DNA
gggttcataatttctgaa

SEQ ID NO: 2200 - DNA, 18 bp, synthetic construct
  source 1..18: mol_type = other DNA
ggttcataatttctgaat

SEQ ID NO: 2201 - DNA, 18 bp, synthetic construct
  source 1..18: mol_type = other DNA
gttcataatttctgaata

SEQ ID NO: 2202 - DNA, 18 bp, synthetic construct
  source 1..18: mol_type = other DNA
ttcataatttctgaatat

SEQ ID NO: 2203 - DNA, 18 bp, synthetic construct
  source 1..18: mol_type = other DNA
tcataatttctgaatatt

SEQ ID NO: 2204 - DNA, 18 bp, synthetic construct
  source 1..18: mol_type = other DNA
cataatttctgaatattt

SEQ ID NO: 2205 - DNA, 18 bp, synthetic construct
  source 1..18: mol_type = other DNA
ataatttctgaatattta

SEQ ID NO: 2206 - DNA, 18 bp, synthetic construct
  source 1..18: mol_type = other DNA
taatttctgaatatttag

SEQ ID NO: 2207 - DNA, 18 bp, synthetic construct
  source 1..18: mol_type = other DNA
aatttctgaatatttaga

SEQ ID NO: 2208 - DNA, 18 bp, synthetic construct
  source 1..18: mol_type = other DNA
atttctgaatatttagat

SEQ ID NO: 2209 - DNA, 18 bp, synthetic construct
  source 1..18: mol_type = other DNA
tttctgaatatttagatg

SEQ ID NO: 2210 - DNA, 18 bp, synthetic construct
  source 1..18: mol_type = other DNA
ttctgaatatttagatgg

SEQ ID NO: 2211 - DNA, 18 bp, synthetic construct
  source 1..18: mol_type = other DNA
tctgaatatttagatgga

SEQ ID NO: 2212 - DNA, 18 bp, synthetic construct
  source 1..18: mol_type = other DNA
ctgaatatttagatggat

SEQ ID NO: 2213 - DNA, 18 bp, synthetic construct
  source 1..18: mol_type = other DNA
tgaatatttagatggatg

SEQ ID NO: 2214 - DNA, 18 bp, synthetic construct
  source 1..18: mol_type = other DNA
aatatttagatggatggt

SEQ ID NO: 2215 - DNA, 18 bp, synthetic construct
  source 1..18: mol_type = other DNA
atatttagatggatggtt

SEQ ID NO: 2216 - DNA, 18 bp, synthetic construct
  source 1..18: mol_type = other DNA
tatttagatggatggttg

SEQ ID NO: 2217 - DNA, 18 bp, synthetic construct
  source 1..18: mol_type = other DNA
atttagatggatggttgt

SEQ ID NO: 2218 - DNA, 18 bp, synthetic construct
  source 1..18: mol_type = other DNA
tttagatggatggttgtg

SEQ ID NO: 2219 - DNA, 18 bp, synthetic construct
  source 1..18: mol_type = other DNA
ttagatggatggttgtga

SEQ ID NO: 2220 - DNA, 18 bp, synthetic construct
  source 1..18: mol_type = other DNA
tagatggatggttgtgag

SEQ ID NO: 2221 - DNA, 18 bp, synthetic construct
  source 1..18: mol_type = other DNA
agatggatggttgtgagt

SEQ ID NO: 2222 - DNA, 18 bp, synthetic construct
  source 1..18: mol_type = other DNA
gatggatggttgtgagtg

SEQ ID NO: 2223 - DNA, 18 bp, synthetic construct
  source 1..18: mol_type = other DNA
atggatggttgtgagtgg

SEQ ID NO: 2224 - DNA, 18 bp, synthetic construct
  source 1..18: mol_type = other DNA
tggatggttgtgagtggc

SEQ ID NO: 2225 - DNA, 18 bp, synthetic construct
  source 1..18: mol_type = other DNA
ggatggttgtgagtggct

SEQ ID NO: 2226 - DNA, 18 bp, synthetic construct
  source 1..18: mol_type = other DNA
gatggttgtgagtggctg

SEQ ID NO: 2227 - DNA, 18 bp, synthetic construct
  source 1..18: mol_type = other DNA
atggttgtgagtggctgg

SEQ ID NO: 2228 - DNA, 18 bp, synthetic construct
  source 1..18: mol_type = other DNA
tggttgtgagtggctggt

SEQ ID NO: 2229 - DNA, 18 bp, synthetic construct
  source 1..18: mol_type = other DNA
ggttgtgagtggctggtg

SEQ ID NO: 2230 - DNA, 18 bp, synthetic construct
  source 1..18: mol_type = other DNA
gttgtgagtggctggtgg

SEQ ID NO: 2231 - DNA, 18 bp, synthetic construct
  source 1..18: mol_type = other DNA
ttgtgagtggctggtgga

SEQ ID NO: 2232 - DNA, 18 bp, synthetic construct
  source 1..18: mol_type = other DNA
tgtgagtggctggtggac

SEQ ID NO: 2233 - DNA, 18 bp, synthetic construct
  source 1..18: mol_type = other DNA
tgagtggctggtggacag

SEQ ID NO: 2234 - DNA, 18 bp, synthetic construct
  source 1..18: mol_type = other DNA
gagtggctggtggacaga

SEQ ID NO: 2235 - DNA, 18 bp, synthetic construct
  source 1..18: mol_type = other DNA
agtggctggtggacagac

SEQ ID NO: 2236 - DNA, 18 bp, synthetic construct
  source 1..18: mol_type = other DNA
gtggctggtggacagacg

SEQ ID NO: 2237 - DNA, 18 bp, synthetic construct
  source 1..18: mol_type = other DNA
tggctggtggacagacga

SEQ ID NO: 2238 - DNA, 18 bp, synthetic construct
  source 1..18: mol_type = other DNA
ggctggtggacagacgaa

SEQ ID NO: 2239 - DNA, 18 bp, synthetic construct
  source 1..18: mol_type = other DNA
gctggtggacagacgaaa

SEQ ID NO: 2240 - DNA, 18 bp, synthetic construct
  source 1..18: mol_type = other DNA
ctggtggacagacgaaaa

SEQ ID NO: 2241 - DNA, 18 bp, synthetic construct
  source 1..18: mol_type = other DNA
tggtggacagacgaaaaa

SEQ ID NO: 2242 - DNA, 18 bp, synthetic construct
  source 1..18: mol_type = other DNA
ggtggacagacgaaaaat

SEQ ID NO: 2243 - DNA, 18 bp, synthetic construct
  source 1..18: mol_type = other DNA
gtggacagacgaaaaatg

SEQ ID NO: 2244 - DNA, 18 bp, synthetic construct
  source 1..18: mol_type = other DNA
tggacagacgaaaaatgg

SEQ ID NO: 2245 - DNA, 18 bp, synthetic construct
  source 1..18: mol_type = other DNA
ggacagacgaaaaatgga

SEQ ID NO: 2246 - DNA, 18 bp, synthetic construct
  source 1..18: mol_type = other DNA
gacagacgaaaaatggat

SEQ ID NO: 2247 - DNA, 18 bp, synthetic construct
  source 1..18: mol_type = other DNA
acagacgaaaaatggatg

SEQ ID NO: 2248 - DNA, 18 bp, synthetic construct
  source 1..18: mol_type = other DNA
cagacgaaaaatggatgg

SEQ ID NO: 2249 - DNA, 18 bp, synthetic construct
  source 1..18: mol_type = other DNA
agacgaaaaatggatggt

SEQ ID NO: 2250 - DNA, 18 bp, synthetic construct
  source 1..18: mol_type = other DNA
gacgaaaaatggatggtt

SEQ ID NO: 2251 - DNA, 18 bp, synthetic construct
  source 1..18: mol_type = other DNA
acgaaaaatggatggttg

SEQ ID NO: 2252 - DNA, 18 bp, synthetic construct
  source 1..18: mol_type = other DNA
gaaaaatggatggttgga

SEQ ID NO: 2253 - DNA, 18 bp, synthetic construct
  source 1..18: mol_type = other DNA
aaaaatggatggttggat

SEQ ID NO: 2254 - DNA, 18 bp, synthetic construct
  source 1..18: mol_type = other DNA
aaaatggatggttggata

SEQ ID NO: 2255 - DNA, 18 bp, synthetic construct
  source 1..18: mol_type = other DNA
aaatggatggttggataa

SEQ ID NO: 2256 - DNA, 18 bp, synthetic construct
  source 1..18: mol_type = other DNA
aatggatggttggataaa

SEQ ID NO: 2257 - DNA, 18 bp, synthetic construct
  source 1..18: mol_type = other DNA
atggatggttggataaat

SEQ ID NO: 2258 - DNA, 18 bp, synthetic construct
  source 1..18: mol_type = other DNA
tggatggttggataaatt

SEQ ID NO: 2259 - DNA, 18 bp, synthetic construct
  source 1..18: mol_type = other DNA
ggatggttggataaattg

SEQ ID NO: 2260 - DNA, 18 bp, synthetic construct
  source 1..18: mol_type = other DNA
gatggttggataaattga

SEQ ID NO: 2261 - DNA, 18 bp, synthetic construct
  source 1..18: mol_type = other DNA
atggttggataaattgat

SEQ ID NO: 2262 - DNA, 18 bp, synthetic construct
  source 1..18: mol_type = other DNA
tggttggataaattgatg

SEQ ID NO: 2263 - DNA, 18 bp, synthetic construct
  source 1..18: mol_type = other DNA
ggttggataaattgatgg

SEQ ID NO: 2264 - DNA, 18 bp, synthetic construct
  source 1..18: mol_type = other DNA
gttggataaattgatggg

SEQ ID NO: 2265 - DNA, 18 bp, synthetic construct
  source 1..18: mol_type = other DNA
ttggataaattgatgggt

SEQ ID NO: 2266 - DNA, 18 bp, synthetic construct
  source 1..18: mol_type = other DNA
tggataaattgatgggtg

SEQ ID NO: 2267 - DNA, 18 bp, synthetic construct
  source 1..18: mol_type = other DNA
ggataaattgatgggtgg

SEQ ID NO: 2268 - DNA, 18 bp, synthetic construct
  source 1..18: mol_type = other DNA
gataaattgatgggtgga

SEQ ID NO: 2269 - DNA, 18 bp, synthetic construct
  source 1..18: mol_type = other DNA
ataaattgatgggtggat

SEQ ID NO: 2270 - DNA, 18 bp, synthetic construct
  source 1..18: mol_type = other DNA
taaattgatgggtggatg

SEQ ID NO: 2271 - DNA, 18 bp, synthetic construct
  source 1..18: mol_type = other DNA
aattgatgggtggatgga

SEQ ID NO: 2272 - DNA, 18 bp, synthetic construct
  source 1..18: mol_type = other DNA
attgatgggtggatggat

SEQ ID NO: 2273 - DNA, 18 bp, synthetic construct
  source 1..18: mol_type = other DNA
ttgatgggtggatggatg

SEQ ID NO: 2274 - DNA, 18 bp, synthetic construct
  source 1..18: mol_type = other DNA
tgatgggtggatggatgg

SEQ ID NO: 2275 - DNA, 18 bp, synthetic construct
  source 1..18: mol_type = other DNA
gatgggtggatggatggt

SEQ ID NO: 2276 - DNA, 18 bp, synthetic construct
  source 1..18: mol_type = other DNA
atgggtggatggatggtt

SEQ ID NO: 2277 - DNA, 18 bp, synthetic construct
  source 1..18: mol_type = other DNA
tgggtggatggatggttg

SEQ ID NO: 2278 - DNA, 18 bp, synthetic construct
  source 1..18: mol_type = other DNA
gggtggatggatggttgg

SEQ ID NO: 2279 - DNA, 18 bp, synthetic construct
  source 1..18: mol_type = other DNA
ggtggatggatggttggt

SEQ ID NO: 2280 - DNA, 18 bp, synthetic construct
  source 1..18: mol_type = other DNA
gtggatggatggttggtt

SEQ ID NO: 2281 - DNA, 18 bp, synthetic construct
  source 1..18: mol_type = other DNA
tggatggatggttggttg

SEQ ID NO: 2282 - DNA, 18 bp, synthetic construct
  source 1..18: mol_type = other DNA
ggatggatggttggttgt

SEQ ID NO: 2283 - DNA, 18 bp, synthetic construct
  source 1..18: mol_type = other DNA
gatggatggttggttgta

SEQ ID NO: 2284 - DNA, 18 bp, synthetic construct
  source 1..18: mol_type = other DNA
atggatggttggttgtat

SEQ ID NO: 2285 - DNA, 18 bp, synthetic construct
  source 1..18: mol_type = other DNA
tggatggttggttgtatg

SEQ ID NO: 2286 - DNA, 18 bp, synthetic construct
  source 1..18: mol_type = other DNA
ggatggttggttgtatga

SEQ ID NO: 2287 - DNA, 18 bp, synthetic construct
  source 1..18: mol_type = other DNA
gatggttggttgtatgaa

SEQ ID NO: 2288 - DNA, 18 bp, synthetic construct
  source 1..18: mol_type = other DNA
atggttggttgtatgaaa

SEQ ID NO: 2289 - DNA, 18 bp, synthetic construct
  source 1..18: mol_type = other DNA
ggttggttgtatgaaaga

SEQ ID NO: 2290 - DNA, 18 bp, synthetic construct
  source 1..18: mol_type = other DNA
gttggttgtatgaaagaa

SEQ ID NO: 2291 - DNA, 18 bp, synthetic construct
  source 1..18: mol_type = other DNA
ttggttgtatgaaagaat

SEQ ID NO: 2292 - DNA, 18 bp, synthetic construct
  source 1..18: mol_type = other DNA
tggttgtatgaaagaatg

SEQ ID NO: 2293 - DNA, 18 bp, synthetic construct
  source 1..18: mol_type = other DNA
ggttgtatgaaagaatga

SEQ ID NO: 2294 - DNA, 18 bp, synthetic construct
  source 1..18: mol_type = other DNA
gttgtatgaaagaatgaa

SEQ ID NO: 2295 - DNA, 18 bp, synthetic construct
  source 1..18: mol_type = other DNA
ttgtatgaaagaatgaat

SEQ ID NO: 2296 - DNA, 18 bp, synthetic construct
  source 1..18: mol_type = other DNA
tgtatgaaagaatgaatg

SEQ ID NO: 2297 - DNA, 18 bp, synthetic construct
  source 1..18: mol_type = other DNA
gtatgaaagaatgaatga

SEQ ID NO: 2298 - DNA, 18 bp, synthetic construct
  source 1..18: mol_type = other DNA
tatgaaagaatgaatgat

SEQ ID NO: 2299 - DNA, 18 bp, synthetic construct
  source 1..18: mol_type = other DNA
atgaaagaatgaatgatt

SEQ ID NO: 2300 - DNA, 18 bp, synthetic construct
  source 1..18: mol_type = other DNA
tgaaagaatgaatgattg

SEQ ID NO: 2301 - DNA, 18 bp, synthetic construct
  source 1..18: mol_type = other DNA
gaaagaatgaatgattgg

SEQ ID NO: 2302 - DNA, 18 bp, synthetic construct
  source 1..18: mol_type = other DNA
aaagaatgaatgattggg

SEQ ID NO: 2303 - DNA, 18 bp, synthetic construct
  source 1..18: mol_type = other DNA
aagaatgaatgattgggt

SEQ ID NO: 2304 - DNA, 18 bp, synthetic construct
  source 1..18: mol_type = other DNA
agaatgaatgattgggta

SEQ ID NO: 2305 - DNA, 18 bp, synthetic construct
  source 1..18: mol_type = other DNA
gaatgaatgattgggtag

SEQ ID NO: 2306 - DNA, 18 bp, synthetic construct
  source 1..18: mol_type = other DNA
aatgaatgattgggtagg

SEQ ID NO: 2307 - DNA, 18 bp, synthetic construct
  source 1..18: mol_type = other DNA
tgaatgattgggtaggtg

SEQ ID NO: 2308 - DNA, 18 bp, synthetic construct
  source 1..18: mol_type = other DNA
gaatgattgggtaggtgg

SEQ ID NO: 2309 - DNA, 18 bp, synthetic construct
  source 1..18: mol_type = other DNA
aatgattgggtaggtgga

SEQ ID NO: 2310 - DNA, 18 bp, synthetic construct
  source 1..18: mol_type = other DNA
atgattgggtaggtggat

SEQ ID NO: 2311 - DNA, 18 bp, synthetic construct
  source 1..18: mol_type = other DNA
tgattgggtaggtggatt

SEQ ID NO: 2312 - DNA, 18 bp, synthetic construct
  source 1..18: mol_type = other DNA
gattgggtaggtggatta

SEQ ID NO: 2313 - DNA, 18 bp, synthetic construct
  source 1..18: mol_type = other DNA
attgggtaggtggattaa

SEQ ID NO: 2314 - DNA, 18 bp, synthetic construct
  source 1..18: mol_type = other DNA
ttgggtaggtggattaag

SEQ ID NO: 2315 - DNA, 18 bp, synthetic construct
  source 1..18: mol_type = other DNA
tgggtaggtggattaagt

SEQ ID NO: 2316 - DNA, 18 bp, synthetic construct
  source 1..18: mol_type = other DNA
gggtaggtggattaagtt

SEQ ID NO: 2317 - DNA, 18 bp, synthetic construct
  source 1..18: mol_type = other DNA
ggtaggtggattaagttg

SEQ ID NO: 2318 - DNA, 18 bp, synthetic construct
  source 1..18: mol_type = other DNA
gtaggtggattaagttgc

SEQ ID NO: 2319 - DNA, 18 bp, synthetic construct
  source 1..18: mol_type = other DNA
taggtggattaagttgcg

SEQ ID NO: 2320 - DNA, 18 bp, synthetic construct
  source 1..18: mol_type = other DNA
aggtggattaagttgcgg

SEQ ID NO: 2321 - DNA, 18 bp, synthetic construct
  source 1..18: mol_type = other DNA
ggtggattaagttgcgga

SEQ ID NO: 2322 - DNA, 18 bp, synthetic construct
  source 1..18: mol_type = other DNA
gtggattaagttgcggat

SEQ ID NO: 2323 - DNA, 18 bp, synthetic construct
  source 1..18: mol_type = other DNA
tggattaagttgcggatc

SEQ ID NO: 2324 - DNA, 18 bp, synthetic construct
  source 1..18: mol_type = other DNA
gattaagttgcggatcaa

SEQ ID NO: 2325 - DNA, 18 bp, synthetic construct
  source 1..18: mol_type = other DNA
attaagttgcggatcaat

SEQ ID NO: 2326 - DNA, 18 bp, synthetic construct
  source 1..18: mol_type = other DNA
ttaagttgcggatcaatg

SEQ ID NO: 2327 - DNA, 18 bp, synthetic construct
  source 1..18: mol_type = other DNA
taagttgcggatcaatgt

SEQ ID NO: 2328 - DNA, 18 bp, synthetic construct
  source 1..18: mol_type = other DNA
aagttgcggatcaatgta

SEQ ID NO: 2329 - DNA, 18 bp, synthetic construct
  source 1..18: mol_type = other DNA
agttgcggatcaatgtat

SEQ ID NO: 2330 - DNA, 18 bp, synthetic construct
  source 1..18: mol_type = other DNA
gttgcggatcaatgtatg

SEQ ID NO: 2331 - DNA, 18 bp, synthetic construct
  source 1..18: mol_type = other DNA
ttgcggatcaatgtatgg

SEQ ID NO: 2332 - DNA, 18 bp, synthetic construct
  source 1..18: mol_type = other DNA
tgcggatcaatgtatggg

SEQ ID NO: 2333 - DNA, 18 bp, synthetic construct
  source 1..18: mol_type = other DNA
gcggatcaatgtatggga

SEQ ID NO: 2334 - DNA, 18 bp, synthetic construct
  source 1..18: mol_type = other DNA
cggatcaatgtatgggat

SEQ ID NO: 2335 - DNA, 18 bp, synthetic construct
  source 1..18: mol_type = other DNA
ggatcaatgtatgggatg

SEQ ID NO: 2336 - DNA, 18 bp, synthetic construct
  source 1..18: mol_type = other DNA
gatcaatgtatgggatgg

SEQ ID NO: 2337 - DNA, 18 bp, synthetic construct
  source 1..18: mol_type = other DNA
atcaatgtatgggatgga

SEQ ID NO: 2338 - DNA, 18 bp, synthetic construct
  source 1..18: mol_type = other DNA
tcaatgtatgggatggat

SEQ ID NO: 2339 - DNA, 18 bp, synthetic construct
  source 1..18: mol_type = other DNA
caatgtatgggatggatg

SEQ ID NO: 2340 - DNA, 18 bp, synthetic construct
  source 1..18: mol_type = other DNA
aatgtatgggatggatga

SEQ ID NO: 2341 - DNA, 18 bp, synthetic construct
  source 1..18: mol_type = other DNA
atgtatgggatggatgaa

SEQ ID NO: 2342 - DNA, 18 bp, synthetic construct
  source 1..18: mol_type = other DNA
gtatgggatggatgaatg

SEQ ID NO: 2343 - DNA, 18 bp, synthetic construct
  source 1..18: mol_type = other DNA
tatgggatggatgaatgg

SEQ ID NO: 2344 - DNA, 18 bp, synthetic construct
  source 1..18: mol_type = other DNA
atgggatggatgaatgga

SEQ ID NO: 2345 - DNA, 18 bp, synthetic construct
  source 1..18: mol_type = other DNA
tgggatggatgaatggat

SEQ ID NO: 2346 - DNA, 18 bp, synthetic construct
  source 1..18: mol_type = other DNA
gggatggatgaatggatg

SEQ ID NO: 2347 - DNA, 18 bp, synthetic construct
  source 1..18: mol_type = other DNA
ggatggatgaatggatgg

SEQ ID NO: 2348 - DNA, 18 bp, synthetic construct
  source 1..18: mol_type = other DNA
gatggatgaatggatgga

SEQ ID NO: 2349 - DNA, 18 bp, synthetic construct
  source 1..18: mol_type = other DNA
atggatgaatggatggat

SEQ ID NO: 2350 - DNA, 18 bp, synthetic construct
  source 1..18: mol_type = other DNA
tggatgaatggatggatg

SEQ ID NO: 2351 - DNA, 18 bp, synthetic construct
  source 1..18: mol_type = other DNA
ggatgaatggatggatgg

SEQ ID NO: 2352 - DNA, 18 bp, synthetic construct
  source 1..18: mol_type = other DNA
gatgaatggatggatgga

SEQ ID NO: 2353 - DNA, 18 bp, synthetic construct
  source 1..18: mol_type = other DNA
atgaatggatggatggat

SEQ ID NO: 2354 - DNA, 18 bp, synthetic construct
  source 1..18: mol_type = other DNA
tgaatggatggatggatg

SEQ ID NO: 2355 - DNA, 18 bp, synthetic construct
  source 1..18: mol_type = other DNA
gaatggatggatggatgg

SEQ ID NO: 2356 - DNA, 18 bp, synthetic construct
  source 1..18: mol_type = other DNA
aatggatggatggatgga

SEQ ID NO: 2357 - DNA, 18 bp, synthetic construct
  source 1..18: mol_type = other DNA
atggatggatggatggat

SEQ ID NO: 2358 - DNA, 18 bp, synthetic construct
  source 1..18: mol_type = other DNA
tggatggatggatggatg

SEQ ID NO: 2359 - DNA, 18 bp, synthetic construct
  source 1..18: mol_type = other DNA
ggatggatggatggatgt

SEQ ID NO: 2360 - DNA, 18 bp, synthetic construct
  source 1..18: mol_type = other DNA
gatggatggatggatgtg

SEQ ID NO: 2361 - DNA, 18 bp, synthetic construct
  source 1..18: mol_type = other DNA
tggatggatggatgtgtg

SEQ ID NO: 2362 - DNA, 18 bp, synthetic construct
  source 1..18: mol_type = other DNA
ggatggatggatgtgtgg

SEQ ID NO: 2363 - DNA, 18 bp, synthetic construct
  source 1..18: mol_type = other DNA
gatggatggatgtgtggt

SEQ ID NO: 2364 - DNA, 18 bp, synthetic construct
  source 1..18: mol_type = other DNA
atggatggatgtgtggtt

SEQ ID NO: 2365 - DNA, 18 bp, synthetic construct
  source 1..18: mol_type = other DNA
tggatggatgtgtggttg

SEQ ID NO: 2366 - DNA, 18 bp, synthetic construct
  source 1..18: mol_type = other DNA
ggatggatgtgtggttga

SEQ ID NO: 2367 - DNA, 18 bp, synthetic construct
  source 1..18: mol_type = other DNA
gatggatgtgtggttgaa

SEQ ID NO: 2368 - DNA, 18 bp, synthetic construct
  source 1..18: mol_type = other DNA
atggatgtgtggttgaat

SEQ ID NO: 2369 - DNA, 18 bp, synthetic construct
  source 1..18: mol_type = other DNA
tggatgtgtggttgaatt

SEQ ID NO: 2370 - DNA, 18 bp, synthetic construct
  source 1..18: mol_type = other DNA
ggatgtgtggttgaatta

SEQ ID NO: 2371 - DNA, 18 bp, synthetic construct
  source 1..18: mol_type = other DNA
gatgtgtggttgaattac

SEQ ID NO: 2372 - DNA, 18 bp, synthetic construct
  source 1..18: mol_type = other DNA
atgtgtggttgaattact

SEQ ID NO: 2373 - DNA, 18 bp, synthetic construct
  source 1..18: mol_type = other DNA
tgtgtggttgaattactg

SEQ ID NO: 2374 - DNA, 18 bp, synthetic construct
  source 1..18: mol_type = other DNA
gtgtggttgaattactga

SEQ ID NO: 2375 - DNA, 18 bp, synthetic construct
  source 1..18: mol_type = other DNA
tgtggttgaattactgaa

SEQ ID NO: 2376 - DNA, 18 bp, synthetic construct
  source 1..18: mol_type = other DNA
gtggttgaattactgaaa

SEQ ID NO: 2377 - DNA, 18 bp, synthetic construct
  source 1..18: mol_type = other DNA
tggttgaattactgaaag

SEQ ID NO: 2378 - DNA, 18 bp, synthetic construct
  source 1..18: mol_type = other DNA
ggttgaattactgaaagg

SEQ ID NO: 2379 - DNA, 18 bp, synthetic construct
  source 1..18: mol_type = other DNA
ttgaattactgaaaggtt

SEQ ID NO: 2380 - DNA, 18 bp, synthetic construct
  source 1..18: mol_type = other DNA
tgaattactgaaaggttg

SEQ ID NO: 2381 - DNA, 18 bp, synthetic construct
  source 1..18: mol_type = other DNA
gaattactgaaaggttgg

SEQ ID NO: 2382 - DNA, 18 bp, synthetic construct
  source 1..18: mol_type = other DNA
aattactgaaaggttgga

SEQ ID NO: 2383 - DNA, 18 bp, synthetic construct
  source 1..18: mol_type = other DNA
attactgaaaggttggaa

SEQ ID NO: 2384 - DNA, 18 bp, synthetic construct
  source 1..18: mol_type = other DNA
ttactgaaaggttggaag

SEQ ID NO: 2385 - DNA, 18 bp, synthetic construct
  source 1..18: mol_type = other DNA
tactgaaaggttggaaga

SEQ ID NO: 2386 - DNA, 18 bp, synthetic construct
  source 1..18: mol_type = other DNA
actgaaaggttggaagag

SEQ ID NO: 2387 - DNA, 18 bp, synthetic construct
  source 1..18: mol_type = other DNA
ctgaaaggttggaagagt

SEQ ID NO: 2388 - DNA, 18 bp, synthetic construct
  source 1..18: mol_type = other DNA
tgaaaggttggaagagtg

SEQ ID NO: 2389 - DNA, 18 bp, synthetic construct
  source 1..18: mol_type = other DNA
gaaaggttggaagagtgg

SEQ ID NO: 2390 - DNA, 18 bp, synthetic construct
  source 1..18: mol_type = other DNA
aaaggttggaagagtgga

SEQ ID NO: 2391 - DNA, 18 bp, synthetic construct
  source 1..18: mol_type = other DNA
aaggttggaagagtggat

SEQ ID NO: 2392 - DNA, 18 bp, synthetic construct
  source 1..18: mol_type = other DNA
aggttggaagagtggatg

SEQ ID NO: 2393 - DNA, 18 bp, synthetic construct
  source 1..18: mol_type = other DNA
ggttggaagagtggatgg

SEQ ID NO: 2394 - DNA, 18 bp, synthetic construct
  source 1..18: mol_type = other DNA
gttggaagagtggatggg

SEQ ID NO: 2395 - DNA, 18 bp, synthetic construct
  source 1..18: mol_type = other DNA
ttggaagagtggatgggt

SEQ ID NO: 2396 - DNA, 18 bp, synthetic construct
  source 1..18: mol_type = other DNA
tggaagagtggatgggtg

SEQ ID NO: 2397 - DNA, 18 bp, synthetic construct
  source 1..18: mol_type = other DNA
ggaagagtggatgggtga

SEQ ID NO: 2398 - DNA, 18 bp, synthetic construct
  source 1..18: mol_type = other DNA
aagagtggatgggtgaaa

SEQ ID NO: 2399 - DNA, 18 bp, synthetic construct
  source 1..18: mol_type = other DNA
agagtggatgggtgaaat

SEQ ID NO: 2400 - DNA, 18 bp, synthetic construct
  source 1..18: mol_type = other DNA
gagtggatgggtgaaatt

SEQ ID NO: 2401 - DNA, 18 bp, synthetic construct
  source 1..18: mol_type = other DNA
agtggatgggtgaaattt

SEQ ID NO: 2402 - DNA, 18 bp, synthetic construct
  source 1..18: mol_type = other DNA
gtggatgggtgaaatttg

SEQ ID NO: 2403 - DNA, 18 bp, synthetic construct
  source 1..18: mol_type = other DNA
tggatgggtgaaatttgg

SEQ ID NO: 2404 - DNA, 18 bp, synthetic construct
  source 1..18: mol_type = other DNA
ggatgggtgaaatttggg

SEQ ID NO: 2405 - DNA, 18 bp, synthetic construct
  source 1..18: mol_type = other DNA
gatgggtgaaatttgggg

SEQ ID NO: 2406 - DNA, 18 bp, synthetic construct
  source 1..18: mol_type = other DNA
atgggtgaaatttggggt

SEQ ID NO: 2407 - DNA, 18 bp, synthetic construct
  source 1..18: mol_type = other DNA
tgggtgaaatttggggta

SEQ ID NO: 2408 - DNA, 18 bp, synthetic construct
  source 1..18: mol_type = other DNA
gggtgaaatttggggtag

SEQ ID NO: 2409 - DNA, 18 bp, synthetic construct
  source 1..18: mol_type = other DNA
ggtgaaatttggggtagt

SEQ ID NO: 2410 - DNA, 18 bp, synthetic construct
  source 1..18: mol_type = other DNA
gtgaaatttggggtagtt

SEQ ID NO: 2411 - DNA, 18 bp, synthetic construct
  source 1..18: mol_type = other DNA
tgaaatttggggtagtta

SEQ ID NO: 2412 - DNA, 18 bp, synthetic construct
  source 1..18: mol_type = other DNA
gaaatttggggtagttag

SEQ ID NO: 2413 - DNA, 18 bp, synthetic construct
  source 1..18: mol_type = other DNA
aaatttggggtagttaga

SEQ ID NO: 2414 - DNA, 18 bp, synthetic construct
  source 1..18: mol_type = other DNA
aatttggggtagttagat

SEQ ID NO: 2415 - DNA, 18 bp, synthetic construct
  source 1..18: mol_type = other DNA
atttggggtagttagatg

SEQ ID NO: 2416 - DNA, 18 bp, synthetic construct
  source 1..18: mol_type = other DNA
tttggggtagttagatgg

SEQ ID NO: 2417 - DNA, 18 bp, synthetic construct
  source 1..18: mol_type = other DNA
tggggtagttagatgggt

SEQ ID NO: 2418 - DNA, 18 bp, synthetic construct
  source 1..18: mol_type = other DNA
ggggtagttagatgggtg

SEQ ID NO: 2419 - DNA, 18 bp, synthetic construct
  source 1..18: mol_type = other DNA
gggtagttagatgggtgg

SEQ ID NO: 2420 - DNA, 18 bp, synthetic construct
  source 1..18: mol_type = other DNA
ggtagttagatgggtggg

SEQ ID NO: 2421 - DNA, 18 bp, synthetic construct
  source 1..18: mol_type = other DNA
gtagttagatgggtgggt

SEQ ID NO: 2422 - DNA, 18 bp, synthetic construct
  source 1..18: mol_type = other DNA
tagttagatgggtgggtg

SEQ ID NO: 2423 - DNA, 18 bp, synthetic construct
  source 1..18: mol_type = other DNA
agttagatgggtgggtgt

SEQ ID NO: 2424 - DNA, 18 bp, synthetic construct
  source 1..18: mol_type = other DNA
gttagatgggtgggtgtg

SEQ ID NO: 2425 - DNA, 18 bp, synthetic construct
  source 1..18: mol_type = other DNA
ttagatgggtgggtgtgt

SEQ ID NO: 2426 - DNA, 18 bp, synthetic construct
  source 1..18: mol_type = other DNA
tagatgggtgggtgtgtg

SEQ ID NO: 2427 - DNA, 18 bp, synthetic construct
  source 1..18: mol_type = other DNA
agatgggtgggtgtgtgg

SEQ ID NO: 2428 - DNA, 18 bp, synthetic construct
  source 1..18: mol_type = other DNA
gatgggtgggtgtgtgga

SEQ ID NO: 2429 - DNA, 18 bp, synthetic construct
  source 1..18: mol_type = other DNA
atgggtgggtgtgtggat

SEQ ID NO: 2430 - DNA, 18 bp, synthetic construct
  source 1..18: mol_type = other DNA
tgggtgggtgtgtggatg

SEQ ID NO: 2431 - DNA, 18 bp, synthetic construct
  source 1..18: mol_type = other DNA
gggtgggtgtgtggatgg

SEQ ID NO: 2432 - DNA, 18 bp, synthetic construct
  source 1..18: mol_type = other DNA
ggtgggtgtgtggatgga

SEQ ID NO: 2433 - DNA, 18 bp, synthetic construct
  source 1..18: mol_type = other DNA
gtgggtgtgtggatggat

SEQ ID NO: 2434 - DNA, 18 bp, synthetic construct
  source 1..18: mol_type = other DNA
tgggtgtgtggatggata

SEQ ID NO: 2435 - DNA, 18 bp, synthetic construct
  source 1..18: mol_type = other DNA
gggtgtgtggatggataa

SEQ ID NO: 2436 - DNA, 18 bp, synthetic construct
  source 1..18: mol_type = other DNA
gtgtgtggatggataaaa

SEQ ID NO: 2437 - DNA, 18 bp, synthetic construct
  source 1..18: mol_type = other DNA
tgtgtggatggataaaag

SEQ ID NO: 2438 - DNA, 18 bp, synthetic construct
  source 1..18: mol_type = other DNA
gtgtggatggataaaaga

SEQ ID NO: 2439 - DNA, 18 bp, synthetic construct
  source 1..18: mol_type = other DNA
tgtggatggataaaagag

SEQ ID NO: 2440 - DNA, 18 bp, synthetic construct
  source 1..18: mol_type = other DNA
gtggatggataaaagagt

SEQ ID NO: 2441 - DNA, 18 bp, synthetic construct
  source 1..18: mol_type = other DNA
tggatggataaaagagta

SEQ ID NO: 2442 - DNA, 18 bp, synthetic construct
  source 1..18: mol_type = other DNA
ggatggataaaagagtag

SEQ ID NO: 2443 - DNA, 18 bp, synthetic construct
  source 1..18: mol_type = other DNA
gatggataaaagagtaga

SEQ ID NO: 2444 - DNA, 18 bp, synthetic construct
  source 1..18: mol_type = other DNA
atggataaaagagtagat

SEQ ID NO: 2445 - DNA, 18 bp, synthetic construct
  source 1..18: mol_type = other DNA
tggataaaagagtagatg

SEQ ID NO: 2446 - DNA, 18 bp, synthetic construct
  source 1..18: mol_type = other DNA
ggataaaagagtagatga

SEQ ID NO: 2447 - DNA, 18 bp, synthetic construct
  source 1..18: mol_type = other DNA
gataaaagagtagatgaa

SEQ ID NO: 2448 - DNA, 18 bp, synthetic construct
  source 1..18: mol_type = other DNA
ataaaagagtagatgaat

SEQ ID NO: 2449 - DNA, 18 bp, synthetic construct
  source 1..18: mol_type = other DNA
taaaagagtagatgaatg

SEQ ID NO: 2450 - DNA, 18 bp, synthetic construct
  source 1..18: mol_type = other DNA
aaaagagtagatgaatga

SEQ ID NO: 2451 - DNA, 18 bp, synthetic construct
  source 1..18: mol_type = other DNA
aaagagtagatgaatgaa

SEQ ID NO: 2452 - DNA, 18 bp, synthetic construct
  source 1..18: mol_type = other DNA
agagtagatgaatgaatt

SEQ ID NO: 2453 - DNA, 18 bp, synthetic construct
  source 1..18: mol_type = other DNA
gagtagatgaatgaatta

SEQ ID NO: 2454 - DNA, 18 bp, synthetic construct
  source 1..18: mol_type = other DNA
agtagatgaatgaattaa

SEQ ID NO: 2455 - DNA, 18 bp, synthetic construct
  source 1..18: mol_type = other DNA
gtagatgaatgaattaat

SEQ ID NO: 2456 - DNA, 18 bp, synthetic construct
  source 1..18: mol_type = other DNA
tagatgaatgaattaatg

SEQ ID NO: 2457 - DNA, 18 bp, synthetic construct
  source 1..18: mol_type = other DNA
agatgaatgaattaatga

SEQ ID NO: 2458 - DNA, 18 bp, synthetic construct
  source 1..18: mol_type = other DNA
gatgaatgaattaatgaa

SEQ ID NO: 2459 - DNA, 18 bp, synthetic construct
  source 1..18: mol_type = other DNA
atgaatgaattaatgaat

SEQ ID NO: 2460 - DNA, 18 bp, synthetic construct
  source 1..18: mol_type = other DNA
tgaatgaattaatgaata

SEQ ID NO: 2461 - DNA, 18 bp, synthetic construct
  source 1..18: mol_type = other DNA
gaatgaattaatgaataa

SEQ ID NO: 2462 - DNA, 18 bp, synthetic construct
  source 1..18: mol_type = other DNA
aatgaattaatgaataaa

SEQ ID NO: 2463 - DNA, 18 bp, synthetic construct
  source 1..18: mol_type = other DNA
atgaattaatgaataaac

SEQ ID NO: 2464 - DNA, 18 bp, synthetic construct
  source 1..18: mol_type = other DNA
tgaattaatgaataaaca

SEQ ID NO: 2465 - DNA, 18 bp, synthetic construct
  source 1..18: mol_type = other DNA
gaattaatgaataaacag

SEQ ID NO: 2466 - DNA, 18 bp, synthetic construct
  source 1..18: mol_type = other DNA
aattaatgaataaacagg

SEQ ID NO: 2467 - DNA, 18 bp, synthetic construct
  source 1..18: mol_type = other DNA
attaatgaataaacaggc

SEQ ID NO: 2468 - DNA, 18 bp, synthetic construct
  source 1..18: mol_type = other DNA
ttaatgaataaacaggca

SEQ ID NO: 2469 - DNA, 18 bp, synthetic construct
  source 1..18: mol_type = other DNA
taatgaataaacaggcag

SEQ ID NO: 2470 - DNA, 18 bp, synthetic construct
  source 1..18: mol_type = other DNA
aatgaataaacaggcaga

SEQ ID NO: 2471 - DNA, 18 bp, synthetic construct
  source 1..18: mol_type = other DNA
tgaataaacaggcagatg

SEQ ID NO: 2472 - DNA, 18 bp, synthetic construct
  source 1..18: mol_type = other DNA
gaataaacaggcagatgg

SEQ ID NO: 2473 - DNA, 18 bp, synthetic construct
  source 1..18: mol_type = other DNA
aataaacaggcagatgga

SEQ ID NO: 2474 - DNA, 18 bp, synthetic construct
  source 1..18: mol_type = other DNA
ataaacaggcagatggat

SEQ ID NO: 2475 - DNA, 18 bp, synthetic construct
  source 1..18: mol_type = other DNA
taaacaggcagatggatg

SEQ ID NO: 2476 - DNA, 18 bp, synthetic construct
  source 1..18: mol_type = other DNA
aaacaggcagatggatga

SEQ ID NO: 2477 - DNA, 18 bp, synthetic construct
  source 1..18: mol_type = other DNA
aacaggcagatggatgat

SEQ ID NO: 2478 - DNA, 18 bp, synthetic construct
  source 1..18: mol_type = other DNA
acaggcagatggatgatg

SEQ ID NO: 2479 - DNA, 18 bp, synthetic construct
  source 1..18: mol_type = other DNA
caggcagatggatgatgt

SEQ ID NO: 2480 - DNA, 18 bp, synthetic construct
  source 1..18: mol_type = other DNA
aggcagatggatgatgta

SEQ ID NO: 2481 - DNA, 18 bp, synthetic construct
  source 1..18: mol_type = other DNA
ggcagatggatgatgtaa

SEQ ID NO: 2482 - DNA, 18 bp, synthetic construct
  source 1..18: mol_type = other DNA
gcagatggatgatgtaag

SEQ ID NO: 2483 - DNA, 18 bp, synthetic construct
  source 1..18: mol_type = other DNA
cagatggatgatgtaagc

SEQ ID NO: 2484 - DNA, 18 bp, synthetic construct
  source 1..18: mol_type = other DNA
agatggatgatgtaagct

SEQ ID NO: 2485 - DNA, 18 bp, synthetic construct
  source 1..18: mol_type = other DNA
gatggatgatgtaagctg

SEQ ID NO: 2486 - DNA, 18 bp, synthetic construct
  source 1..18: mol_type = other DNA
tggatgatgtaagctgcc

SEQ ID NO: 2487 - DNA, 18 bp, synthetic construct
  source 1..18: mol_type = other DNA
ggatgatgtaagctgccc

SEQ ID NO: 2488 - DNA, 18 bp, synthetic construct
  source 1..18: mol_type = other DNA
gatgatgtaagctgcccc

SEQ ID NO: 2489 - DNA, 18 bp, synthetic construct
  source 1..18: mol_type = other DNA
atgatgtaagctgcccca

SEQ ID NO: 2490 - DNA, 18 bp, synthetic construct
  source 1..18: mol_type = other DNA
tgatgtaagctgccccag

SEQ ID NO: 2491 - DNA, 18 bp, synthetic construct
  source 1..18: mol_type = other DNA
gatgtaagctgccccaga

SEQ ID NO: 2492 - DNA, 18 bp, synthetic construct
  source 1..18: mol_type = other DNA
atgtaagctgccccagac

SEQ ID NO: 2493 - DNA, 18 bp, synthetic construct
  source 1..18: mol_type = other DNA
tgtaagctgccccagacc

SEQ ID NO: 2494 - DNA, 18 bp, synthetic construct
  source 1..18: mol_type = other DNA
gtaagctgccccagaccc

SEQ ID NO: 2495 - DNA, 18 bp, synthetic construct
  source 1..18: mol_type = other DNA
taagctgccccagaccct

SEQ ID NO: 2496 - DNA, 18 bp, synthetic construct
  source 1..18: mol_type = other DNA
aagctgccccagaccctg

SEQ ID NO: 2497 - DNA, 18 bp, synthetic construct
  source 1..18: mol_type = other DNA
gctgccccagaccctggg

SEQ ID NO: 2498 - DNA, 18 bp, synthetic construct
  source 1..18: mol_type = other DNA
ctgccccagaccctggga

SEQ ID NO: 2499 - DNA, 18 bp, synthetic construct
  source 1..18: mol_type = other DNA
tgccccagaccctgggac

SEQ ID NO: 2500 - DNA, 18 bp, synthetic construct
  source 1..18: mol_type = other DNA
gccccagaccctgggacc

SEQ ID NO: 2501 - DNA, 18 bp, synthetic construct
  source 1..18: mol_type = other DNA
ccccagaccctgggacct

SEQ ID NO: 2502 - DNA, 18 bp, synthetic construct
  source 1..18: mol_type = other DNA
cccagaccctgggacctc

SEQ ID NO: 2503 - DNA, 18 bp, synthetic construct
  source 1..18: mol_type = other DNA
ccagaccctgggacctct

SEQ ID NO: 2504 - DNA, 18 bp, synthetic construct
  source 1..18: mol_type = other DNA
cagaccctgggacctctg

SEQ ID NO: 2505 - DNA, 18 bp, synthetic construct
  source 1..18: mol_type = other DNA
agaccctgggacctctga

SEQ ID NO: 2506 - DNA, 18 bp, synthetic construct
  source 1..18: mol_type = other DNA
gaccctgggacctctgac

SEQ ID NO: 2507 - DNA, 18 bp, synthetic construct
  source 1..18: mol_type = other DNA
accctgggacctctgacc

SEQ ID NO: 2508 - DNA, 18 bp, synthetic construct
  source 1..18: mol_type = other DNA
ccctgggacctctgaccc

SEQ ID NO: 2509 - DNA, 18 bp, synthetic construct
  source 1..18: mol_type = other DNA
cctgggacctctgacccc

SEQ ID NO: 2510 - DNA, 18 bp, synthetic construct
  source 1..18: mol_type = other DNA
ctgggacctctgaccccc

SEQ ID NO: 2511 - DNA, 18 bp, synthetic construct
  source 1..18: mol_type = other DNA
tgggacctctgacccccg

SEQ ID NO: 2512 - DNA, 18 bp, synthetic construct
  source 1..18: mol_type = other DNA
gggacctctgacccccgg

SEQ ID NO: 2513 - DNA, 18 bp, synthetic construct
  source 1..18: mol_type = other DNA
ggacctctgacccccggc

SEQ ID NO: 2514 - DNA, 18 bp, synthetic construct
  source 1..18: mol_type = other DNA
gacctctgacccccggcg

SEQ ID NO: 2515 - DNA, 18 bp, synthetic construct
  source 1..18: mol_type = other DNA
acctctgacccccggcga

SEQ ID NO: 2516 - DNA, 18 bp, synthetic construct
  source 1..18: mol_type = other DNA
ctctgacccccggcgacc

SEQ ID NO: 2517 - DNA, 18 bp, synthetic construct
  source 1..18: mol_type = other DNA
tctgacccccggcgaccc

SEQ ID NO: 2518 - DNA, 18 bp, synthetic construct
  source 1..18: mol_type = other DNA
ctgacccccggcgacccc

SEQ ID NO: 2519 - DNA, 18 bp, synthetic construct
  source 1..18: mol_type = other DNA
tgacccccggcgacccct

SEQ ID NO: 2520 - DNA, 18 bp, synthetic construct
  source 1..18: mol_type = other DNA
gacccccggcgacccctt

SEQ ID NO: 2521 - DNA, 18 bp, synthetic construct
  source 1..18: mol_type = other DNA
acccccggcgaccccttg

SEQ ID NO: 2522 - DNA, 18 bp, synthetic construct
  source 1..18: mol_type = other DNA
cccccggcgaccccttgc

SEQ ID NO: 2523 - DNA, 18 bp, synthetic construct
  source 1..18: mol_type = other DNA
ccccggcgaccccttgca

SEQ ID NO: 2524 - DNA, 18 bp, synthetic construct
  source 1..18: mol_type = other DNA
cccggcgaccccttgcac

SEQ ID NO: 2525 - DNA, 18 bp, synthetic construct
  source 1..18: mol_type = other DNA
ccggcgaccccttgcact

SEQ ID NO: 2526 - DNA, 18 bp, synthetic construct
  source 1..18: mol_type = other DNA
cggcgaccccttgcactc

SEQ ID NO: 2527 - DNA, 18 bp, synthetic construct
  source 1..18: mol_type = other DNA
ggcgaccccttgcactct

SEQ ID NO: 2528 - DNA, 18 bp, synthetic construct
  source 1..18: mol_type = other DNA
gcgaccccttgcactctc

SEQ ID NO: 2529 - DNA, 18 bp, synthetic construct
  source 1..18: mol_type = other DNA
cgaccccttgcactctcc

SEQ ID NO: 2530 - DNA, 18 bp, synthetic construct
  source 1..18: mol_type = other DNA
gaccccttgcactctcca

SEQ ID NO: 2531 - DNA, 18 bp, synthetic construct
  source 1..18: mol_type = other DNA
accccttgcactctccat

SEQ ID NO: 2532 - DNA, 18 bp, synthetic construct
  source 1..18: mol_type = other DNA
ccccttgcactctccatg

SEQ ID NO: 2533 - DNA, 18 bp, synthetic construct
  source 1..18: mol_type = other DNA
cccttgcactctccatga

SEQ ID NO: 2534 - DNA, 18 bp, synthetic construct
  source 1..18: mol_type = other DNA
ccttgcactctccatgac

SEQ ID NO: 2535 - DNA, 18 bp, synthetic construct
  source 1..18: mol_type = other DNA
ttgcactctccatgacac

SEQ ID NO: 2536 - DNA, 18 bp, synthetic construct
  source 1..18: mol_type = other DNA
tgcactctccatgacact

SEQ ID NO: 2537 - DNA, 18 bp, synthetic construct
  source 1..18: mol_type = other DNA
gcactctccatgacactt

SEQ ID NO: 2538 - DNA, 18 bp, synthetic construct
  source 1..18: mol_type = other DNA
cactctccatgacacttt

SEQ ID NO: 2539 - DNA, 18 bp, synthetic construct
  source 1..18: mol_type = other DNA
actctccatgacactttc

SEQ ID NO: 2540 - DNA, 18 bp, synthetic construct
  source 1..18: mol_type = other DNA
ctctccatgacactttct

SEQ ID NO: 2541 - DNA, 18 bp, synthetic construct
  source 1..18: mol_type = other DNA
tctccatgacactttctc

SEQ ID NO: 2542 - DNA, 18 bp, synthetic construct
  source 1..18: mol_type = other DNA
ctccatgacactttctct

SEQ ID NO: 2543 - DNA, 18 bp, synthetic construct
  source 1..18: mol_type = other DNA
tccatgacactttctctc

SEQ ID NO: 2544 - DNA, 18 bp, synthetic construct
  source 1..18: mol_type = other DNA
ccatgacactttctctcc

SEQ ID NO: 2545 - DNA, 18 bp, synthetic construct
  source 1..18: mol_type = other DNA
catgacactttctctccc

SEQ ID NO: 2546 - DNA, 18 bp, synthetic construct
  source 1..18: mol_type = other DNA
atgacactttctctccca

SEQ ID NO: 2547 - DNA, 18 bp, synthetic construct
  source 1..18: mol_type = other DNA
tgacactttctctcccat

SEQ ID NO: 2548 - DNA, 18 bp, synthetic construct
  source 1..18: mol_type = other DNA
gacactttctctcccatg

SEQ ID NO: 2549 - DNA, 18 bp, synthetic construct
  source 1..18: mol_type = other DNA
acactttctctcccatgg

SEQ ID NO: 2550 - DNA, 18 bp, synthetic construct
  source 1..18: mol_type = other DNA
cactttctctcccatggt

SEQ ID NO: 2551 - DNA, 18 bp, synthetic construct
  source 1..18: mol_type = other DNA
actttctctcccatggtg

SEQ ID NO: 2552 - DNA, 18 bp, synthetic construct
  source 1..18: mol_type = other DNA
ctttctctcccatggtgg

SEQ ID NO: 2553 - DNA, 18 bp, synthetic construct
  source 1..18: mol_type = other DNA
tttctctcccatggtggc

SEQ ID NO: 2554 - DNA, 18 bp, synthetic construct
  source 1..18: mol_type = other DNA
tctctcccatggtggcag

SEQ ID NO: 2555-2570 - skipped (16 entries)

SEQ ID NO: 2571 - DNA, 18 bp, synthetic construct
  source 1..18: mol_type = other DNA
  modified_base 1..18: mod_base = OTHER; note = 2'-O-(2-methoxyethyl) nucleotide phosphorothioate
  modified_base 1: mod_base = OTHER; note = 5-methyl cytosine
  modified_base 15..17: mod_base = OTHER; note = 5-methyl cytosine
  modified_base 8: mod_base = OTHER; note = A nucleoside-replacement group characterized by the lack of a nucleotide base
  modified_base 11: mod_base = OTHER; note = A nucleoside-replacement group characterized by the lack of a nucleotide base
ctggaagnganataccca

SEQ ID NO: 2572 - DNA, 18 bp, synthetic construct
  source 1..18: mol_type = other DNA
  modified_base 1..18: mod_base = OTHER; note = 2'-O-(2-methoxyethyl) nucleotide phosphorothioate
  modified_base 1: mod_base = OTHER; note = 5-methyl cytosine
  modified_base 11: mod_base = OTHER; note = 5-methyl cytosine
  modified_base 15..17: mod_base = OTHER; note = 5-methyl cytosine
  modified_base 5: mod_base = OTHER; note = A nucleoside-replacement group characterized by the lack of a nucleotide base
  modified_base 13: mod_base = OTHER; note = A nucleoside-replacement group characterized by the lack of a nucleotide base
ctggnagagacanaccca

SEQ ID NO: 2573 - DNA, 18 bp, synthetic construct
  source 1..18: mol_type = other DNA
  modified_base 1..18: mod_base = OTHER; note = 2'-O-(2-methoxyethyl) nucleotide phosphorothioate
  modified_base 1: mod_base = OTHER; note = 5-methyl cytosine
  modified_base 11: mod_base = OTHER; note = 5-methyl cytosine
  modified_base 15..17: mod_base = OTHER; note = 5-methyl cytosine
  modified_base 6: mod_base = OTHER; note = A nucleoside-replacement group characterized by the lack of a nucleotide base
  modified_base 14: mod_base = OTHER; note = A nucleoside-replacement group characterized by the lack of a nucleotide base
ctggangagacatnccca

SEQ ID NO: 2574 - DNA, 18 bp, synthetic construct
  source 1..18: mol_type = other DNA
  modified_base 1..18: mod_base = OTHER; note = 2'-O-(2-methoxyethyl) nucleotide phosphorothioate
  modified_base 3: mod_base = OTHER; note = 5-methyl cytosine
  modified_base 6: mod_base = OTHER; note = 5-methyl cytosine
  modified_base 16: mod_base = OTHER; note = 5-methyl cytosine
  modified_base 8: mod_base = OTHER; note = A nucleoside-replacement group characterized by the lack of a nucleotide base
  modified_base 11: mod_base = OTHER; note = A nucleoside-replacement group characterized by the lack of a nucleotide base
ggcagctngangagacat

SEQ ID NO: 2575 - DNA, 18 bp, synthetic construct
  source 1..18: mol_type = other DNA
  modified_base 1..18: mod_base = OTHER; note = 2'-O-(2-methoxyethyl) nucleotide phosphorothioate
  modified_base 3: mod_base = OTHER; note = 5-methyl cytosine
  modified_base 6: mod_base = OTHER; note = 5-methyl cytosine
  modified_base 16: mod_base = OTHER; note = 5-methyl cytosine
  modified_base 5: mod_base = OTHER; note = A nucleoside-replacement group characterized by the lack of a nucleotide base
  modified_base 13: mod_base = OTHER; note = A nucleoside-replacement group characterized by the lack of a nucleotide base
ggcanctggaagngacat

SEQ ID NO: 2576 - DNA, 18 bp, synthetic construct
  source 1..18: mol_type = other DNA
  modified_base 1..18: mod_base = OTHER; note = 2'-O-(2-methoxyethyl) nucleotide phosphorothioate
  modified_base 3: mod_base = OTHER; note = 5-methyl cytosine
  modified_base 16: mod_base = OTHER; note = 5-methyl cytosine
  modified_base 6: mod_base = OTHER; note = A nucleoside-replacement group characterized by the lack of a nucleotide base
  modified_base 14: mod_base = OTHER; note = A nucleoside-replacement group characterized by the lack of a nucleotide base
ggcagntggaaganacat

SEQ ID NO: 2577 - DNA, 18 bp, synthetic construct
  source 1..18: mol_type = other DNA
  modified_base 1..18: mod_base = OTHER; note = 2'-O-(2-methoxyethyl) nucleotide phosphorothioate
  modified_base 1: mod_base = OTHER; note = 5-methyl cytosine
  modified_base 5..7: mod_base = OTHER; note = 5-methyl cytosine
  modified_base 13: mod_base = OTHER; note = 5-methyl cytosine
  modified_base 17: mod_base = OTHER; note = 5-methyl cytosine
  modified_base 8: mod_base = OTHER; note = A nucleoside-replacement group characterized by the lack of a nucleotide base
  modified_base 11: mod_base = OTHER; note = A nucleoside-replacement group characterized by the lack of a nucleotide base
catacccnganacaaacg

SEQ ID NO: 2578 - DNA, 18 bp, synthetic construct
  source 1..18: mol_type = other DNA
  modified_base 1..18: mod_base = OTHER; note = 2'-O-(2-methoxyethyl) nucleotide phosphorothioate
  modified_base 1: mod_base = OTHER; note = 5-methyl cytosine
  modified_base 6..7: mod_base = OTHER; note = 5-methyl cytosine
  modified_base 11: mod_base = OTHER; note = 5-methyl cytosine
  modified_base 17: mod_base = OTHER; note = 5-methyl cytosine
  modified_base 5: mod_base = OTHER; note = A nucleoside-replacement group characterized by the lack of a nucleotide base
  modified_base 13: mod_base = OTHER; note = A nucleoside-replacement group characterized by the lack of a nucleotide base
catanccagacanaaacg

SEQ ID NO: 2579 - DNA, 18 bp, synthetic construct
  source 1..18: mol_type = other DNA
  modified_base 1..18: mod_base = OTHER; note = 2'-O-(2-methoxyethyl) nucleotide phosphorothioate
  modified_base 1: mod_base = OTHER; note = 5-methyl cytosine
  modified_base 5: mod_base = OTHER; note = 5-methyl cytosine
  modified_base 7: mod_base = OTHER; note = 5-methyl cytosine
  modified_base 11: mod_base = OTHER; note = 5-methyl cytosine
  modified_base 13: mod_base = OTHER; note = 5-methyl cytosine
  modified_base 17: mod_base = OTHER; note = 5-methyl cytosine
  modified_base 6: mod_base = OTHER; note = A nucleoside-replacement group characterized by the lack of a nucleotide base
  modified_base 14: mod_base = OTHER; note = A nucleoside-replacement group characterized by the lack of a nucleotide base
catacncagacacnaacg

SEQ ID NO: 2580 - DNA, 18 bp, synthetic construct
  source 1..18: mol_type = other DNA
  modified_base 1..18: mod_base = OTHER; note = 2'-O-(2-methoxyethyl) nucleotide phosphorothioate
  modified_base 6: mod_base = OTHER; note = 5-methyl cytosine
  modified_base 10: mod_base = OTHER; note = 5-methyl cytosine
  modified_base 12: mod_base = OTHER; note = 5-methyl cytosine
  modified_base 16: mod_base = OTHER; note = 5-methyl cytosine
  modified_base 18: mod_base = OTHER; note = 5-methyl cytosine
  modified_base 8: mod_base = OTHER; note = A nucleoside-replacement group characterized by the lack of a nucleotide base
  modified_base 11: mod_base = OTHER; note = A nucleoside-replacement group characterized by the lack of a nucleotide base
agagacanacncagacac

SEQ ID NO: 2581 - DNA, 18 bp, synthetic construct
  source 1..18: mol_type = other DNA
  modified_base 1..18: mod_base = OTHER; note = 2'-O-(2-methoxyethyl) nucleotide phosphorothioate
  modified_base 6: mod_base = OTHER; note = 5-methyl cytosine
  modified_base 10..12: mod_base = OTHER; note = 5-methyl cytosine
  modified_base 16: mod_base = OTHER; note = 5-methyl cytosine
  modified_base 18: mod_base = OTHER; note = 5-methyl cytosine
  modified_base 5: mod_base = OTHER; note = A nucleoside-replacement group characterized by the lack of a nucleotide base
  modified_base 13: mod_base = OTHER; note = A nucleoside-replacement group characterized by the lack of a nucleotide base
agagncatacccngacac

SEQ ID NO: 2582 - DNA, 18 bp, synthetic construct
  source 1..18: mol_type = other DNA
  modified_base 1..18: mod_base = OTHER; note = 2'-O-(2-methoxyethyl) nucleotide phosphorothioate
  modified_base 10..12: mod_base = OTHER; note = 5-methyl cytosine
  modified_base 16: mod_base = OTHER; note = 5-methyl cytosine
  modified_base 18: mod_base = OTHER; note = 5-methyl cytosine
  modified_base 6: mod_base = OTHER; note = A nucleoside-replacement group characterized by the lack of a nucleotide base
  modified_base 14: mod_base = OTHER; note = A nucleoside-replacement group characterized by the lack of a nucleotide base
agaganatacccanacac

SEQ ID NO: 2583 - DNA, 18 bp, synthetic construct
  source 1..18: mol_type = other DNA
  modified_base 1..18: mod_base = OTHER; note = 2'-O-(2-methoxyethyl) nucleotide phosphorothioate
  modified_base 4..6: mod_base = OTHER; note = 5-methyl cytosine
  modified_base 10: mod_base = OTHER; note = 5-methyl cytosine
  modified_base 12: mod_base = OTHER; note = 5-methyl cytosine
  modified_base 16: mod_base = OTHER; note = 5-methyl cytosine
  modified_base 8: mod_base = OTHER; note = A nucleoside-replacement group characterized by the lack of a nucleotide base
  modified_base 11: mod_base = OTHER; note = A nucleoside-replacement group characterized by the lack of a nucleotide base
atacccanacncaaacgg

SEQ ID NO: 2584 - DNA, 18 bp, synthetic construct
  source 1..18: mol_type = other DNA
  modified_base 1..18: mod_base = OTHER; note = 2'-O-(2-methoxyethyl) nucleotide phosphorothioate
  modified_base 4: mod_base = OTHER; note = 5-methyl cytosine
  modified_base 6: mod_base = OTHER; note = 5-methyl cytosine
  modified_base 10: mod_base = OTHER; note = 5-methyl cytosine
  modified_base 12: mod_base = OTHER; note = 5-methyl cytosine
  modified_base 16: mod_base = OTHER; note = 5-methyl cytosine
  modified_base 5: mod_base = OTHER; note = A nucleoside-replacement group characterized by the lack of a nucleotide base
  modified_base 13: mod_base = OTHER; note = A nucleoside-replacement group characterized by the lack of a nucleotide base
atacncagacacnaacgg

SEQ ID NO: 2585 - DNA, 18 bp, synthetic construct
  source 1..18: mol_type = other DNA
  modified_base 1..18: mod_base = OTHER; note = 2'-O-(2-methoxyethyl) nucleotide phosphorothioate
  modified_base 4..5: mod_base = OTHER; note = 5-methyl cytosine
  modified_base 10: mod_base = OTHER; note = 5-methyl cytosine
  modified_base 12: mod_base = OTHER; note = 5-methyl cytosine
  modified_base 16: mod_base = OTHER; note = 5-methyl cytosine
  modified_base 6: mod_base = OTHER; note = A nucleoside-replacement group characterized by the lack of a nucleotide base
  modified_base 14: mod_base = OTHER; note = A nucleoside-replacement group characterized by the lack of a nucleotide base
ataccnagacacanacgg

SEQ ID NO: 2586 - DNA, 18 bp, synthetic construct
  source 1..18: mol_type = other DNA
  modified_base 1..18: mod_base = OTHER; note = 2'-O-(2-methoxyethyl) nucleotide phosphorothioate
  modified_base 5: mod_base = OTHER; note = 5-methyl cytosine
  modified_base 9..10: mod_base = OTHER; note = 5-methyl cytosine
  modified_base 15: mod_base = OTHER; note = 5-methyl cytosine
  modified_base 17: mod_base = OTHER; note = 5-methyl cytosine
  modified_base 8: mod_base = OTHER; note = A nucleoside-replacement group characterized by the lack of a nucleotide base
  modified_base 11: mod_base = OTHER; note = A nucleoside-replacement group characterized by the lack of a nucleotide base
gagacatnccnagacaca

SEQ ID NO: 2587 - DNA, 18 bp, synthetic construct
  source 1..18: mol_type = other DNA
  modified_base 1..18: mod_base = OTHER; note = 2'-O-(2-methoxyethyl) nucleotide phosphorothioate
  modified_base 9..11: mod_base = OTHER; note = 5-methyl cytosine
  modified_base 15: mod_base = OTHER; note = 5-methyl cytosine
  modified_base 17: mod_base = OTHER; note = 5-methyl cytosine
  modified_base 5: mod_base = OTHER; note = A nucleoside-replacement group characterized by the lack of a nucleotide base
  modified_base 13: mod_base = OTHER; note = A nucleoside-replacement group characterized by the lack of a nucleotide base
gaganatacccanacaca

SEQ ID NO: 2588 - DNA, 18 bp, synthetic construct
  source 1..18: mol_type = other DNA
  modified_base 1..18: mod_base = OTHER; note = 2'-O-(2-methoxyethyl) nucleotide phosphorothioate
  modified_base 5: mod_base = OTHER; note = 5-methyl cytosine
  modified_base 9..11: mod_base = OTHER; note = 5-methyl cytosine
  modified_base 15: mod_base = OTHER; note = 5-methyl cytosine
  modified_base 17: mod_base = OTHER; note = 5-methyl cytosine
  modified_base 6: mod_base = OTHER; note = A nucleoside-replacement group characterized by the lack of a nucleotide base
  modified_base 14: mod_base = OTHER; note = A nucleoside-replacement group characterized by the lack of a nucleotide base
gagacntacccagncaca

SEQ ID NO: 2589 - DNA, 18 bp, synthetic construct
  source 1..18: mol_type = other DNA
  modified_base 1..18: mod_base = OTHER; note = 2'-O-(2-methoxyethyl) nucleotide phosphorothioate
  modified_base 2: mod_base = OTHER; note = 5-methyl cytosine
  modified_base 6..7: mod_base = OTHER; note = 5-methyl cytosine
  modified_base 14..16: mod_base = OTHER; note = 5-methyl cytosine
  modified_base 8: mod_base = OTHER; note = A nucleoside-replacement group characterized by the lack of a nucleotide base
  modified_base 11: mod_base = OTHER; note = A nucleoside-replacement group characterized by the lack of a nucleotide base
tctttccnggnaacccag

SEQ ID NO: 2590 - DNA, 18 bp, synthetic construct
  source 1..18: mol_type = other DNA
  modified_base 1..18: mod_base = OTHER; note = 2'-O-(2-methoxyethyl) nucleotide phosphorothioate
  modified_base 2: mod_base = OTHER; note = 5-methyl cytosine
  modified_base 6..7: mod_base = OTHER; note = 5-methyl cytosine
  modified_base 14..16: mod_base = OTHER; note = 5-methyl cytosine
  modified_base 5: mod_base = OTHER; note = A nucleoside-replacement group characterized by the lack of a nucleotide base
  modified_base 13: mod_base = OTHER; note = A nucleoside-replacement group characterized by the lack of a nucleotide base
tcttnccaggaancccag

SEQ ID NO: 2591 - DNA, 18 bp, synthetic construct
  source 1..18: mol_type = other DNA
  modified_base 1..18: mod_base = OTHER; note = 2'-O-(2-methoxyethyl) nucleotide phosphorothioate
  modified_base 2: mod_base = OTHER; note = 5-methyl cytosine
  modified_base 7: mod_base = OTHER; note = 5-methyl cytosine
  modified_base 15..16: mod_base = OTHER; note = 5-methyl cytosine
  modified_base 6: mod_base = OTHER; note = A nucleoside-replacement group characterized by the lack of a nucleotide base
  modified_base 14: mod_base = OTHER; note = A nucleoside-replacement group characterized by the lack of a nucleotide base
tctttncaggaaanccag

SEQ ID NO: 2592 - DNA, 18 bp, synthetic construct
  source 1..18: mol_type = other DNA
  modified_base 1..18: mod_base = OTHER; note = 2'-O-(2-methoxyethyl) nucleotide phosphorothioate
  modified_base 7: mod_base = OTHER; note = 5-methyl cytosine
  modified_base 12: mod_base = OTHER; note = 5-methyl cytosine
  modified_base 8: mod_base = OTHER; note = A nucleoside-replacement group characterized by the lack of a nucleotide base
  modified_base 11: mod_base = OTHER; note = A nucleoside-replacement group characterized by the lack of a nucleotide base
agagttcnttncaggaaa

SEQ ID NO: 2593 - DNA, 18 bp, synthetic construct
  source 1..18: mol_type = other DNA
  modified_base 1..18: mod_base = OTHER; note = 2'-O-(2-methoxyethyl) nucleotide phosphorothioate
  modified_base 7: mod_base = OTHER; note = 5-methyl cytosine
  modified_base 11..12: mod_base = OTHER; note = 5-methyl cytosine
  modified_base 5: mod_base = OTHER; note = A nucleoside-replacement group characterized by the lack of a nucleotide base
  modified_base 13: mod_base = OTHER; note = A nucleoside-replacement group characterized by the lack of a nucleotide base
agagntctttccnggaaa

SEQ ID NO: 2594 - DNA, 18 bp, synthetic construct
  source 1..18: mol_type = other DNA
  modified_base 1..18: mod_base = OTHER; note = 2'-O-(2-methoxyethyl) nucleotide phosphorothioate
  modified_base 7: mod_base = OTHER; note = 5-methyl cytosine
  modified_base 11..12: mod_base = OTHER; note = 5-methyl cytosine
  modified_base 6: mod_base = OTHER; note = A nucleoside-replacement group characterized by the lack of a nucleotide base
  modified_base 14: mod_base = OTHER; note = A nucleoside-replacement group characterized by the lack of a nucleotide base
agagtnctttccangaaa

SEQ ID NO: 2595 - DNA, 20 bp, synthetic construct
  source 1..20: mol_type = other DNA
  modified_base 1..20: mod_base = OTHER; note = 2'-O-(2-methoxyethyl) nucleotide phosphorothioate
  modified_base 5: mod_base = OTHER; note = 5-methyl cytosine
  modified_base 8: mod_base = OTHER; note = 5-methyl cytosine
  modified_base 17: mod_base = OTHER; note = 5-methyl cytosine
  misc_feature 1..5: note = RNA
  misc_feature 6..15: note = DNA
  misc_feature 16..20: note = RNA
aaggcttcatattgtacttt

SEQ ID NO: 2596 - DNA, 18 bp, synthetic construct
  source 1..18: mol_type = other DNA
attgttctgcacgtcggt

SEQ ID NO: 2597 - DNA, 21 bp, synthetic construct
  source 1..21: mol_type = other DNA
gtctgggtatgtctcttccag

SEQ ID NO: 2598 - DNA, 24 bp, synthetic construct
  source 1..24: mol_type = other DNA
agttctttccaggaaacccaggca
